(19) United States
(12) Patent Application Publication
(10) Pub. No.: US 2011/0105584 A1
(43) Pub. Date: May 5, 2011

(54) RTP80IL SIRNA COMPOUNDS AND METHODS OF USE THEREOF

(76) Inventors: Elena Feinstein, Rehovot (IL); Igor Mett, Rehovot (IL); Hagar Kalinski, Rishon-Ie-Zion (IL)

(21) Appl. No.: 12/735,061

(22) PCT Filed: Dec. 11, 2008
(86) PCT No.: PCT/IL2008/001606

§ 371 Date: Jan. 13, 2011

Related U.S. Application Data
(60) Provisional application No. 61/007,480, filed on Dec. 12, 2007.

(51) Int. Cl. A61K 31/713; C07H 21/02; A61P 27/16; A61P 27/02; A61P 25/00; A61P 11/00; A61P 9/00; A61P 27/06; A61P 11/06; A61P 9/10; A61P 13/12; A61P 17/00

(52) U.S. Cl. 514/44 A; 536/24.5

(57) ABSTRACT

The invention provides chemically modified siRNA oligonucleotides that target RTP801L, compositions comprising same and to the use of such molecules to treat, inter alia, respiratory diseases including acute and chronic pulmonary disorders, eye diseases including glaucoma and ION, microvascular disorders, angiogenesis- and apoptosis-related conditions, and hearing impairments.

### FIELD OF THE INVENTION

[0001] The present invention relates to double stranded oligonucleotide inhibitors of RTP801L (RTP801-like; REDD2, DNA-damage-inducible transcript 4-like, DDIT4_L), pharmaceutical compositions comprising same and methods of use thereof. The compounds and compositions are thus useful in the treatment of subjects suffering from diseases or conditions and or symptoms associated with such diseases or conditions in which RTP801L expression has adverse consequences. In particular embodiments, the invention provides chemically modified siRNA oligonucleotides, compositions comprising same and to the use of such molecules to treat, inter alia, respiratory disorders of all types (including acute and chronic pulmonary disorders), eye diseases including glaucoma and ION, microvascular disorders, angiogenesis- and apoptosis-related conditions, and hearing impairments.

### BACKGROUND OF THE INVENTION

### siRNAs and RNA Interference

[0002] RNA interference (RNAi) is a phenomenon involving double-stranded (ds) RNA-dependent gene specific posttranscriptional silencing. Originally, attempts to study this phenomenon and to manipulate mammalian cells experimentally were frustrated by an active, non-specific antiviral defense mechanism which was activated in response to long dsRNA molecules (see Gil et al. 2000, Apoptosis, 5:107-114). Later it was discovered that synthetic duplexes of 21 nucleotide RNAs could mediate gene specific RNAi in mammalian cells, without the stimulation of the generic antiviral defense mechanisms (see Elbashir et al., 2001. Nature, 411:494-498 and Caplen et al., 2001. PNAS, 98:9742-9747). As a result, small interfering RNAs (siRNAs), which are short double-stranded RNAs, have become powerful tools in attempting to understand gene function. Thus RNA interference (RNAi) refers to the process of sequence-specific post-transcriptional gene silencing in mammals mediated by small interfering RNAs (siRNAs) (Fire et al, 1998, Nature 391:806) or microRNAs (miRNAs) (Ambros, 2004. Nature 431:7006, 350-355; and Bartel, 2004. Cell. 116(2):281-97). The corresponding process in plants is commonly referred to as specific post transcriptional gene silencing or RNA silencing and is also referred to as quelling in fungi.

[0003] An siRNA is a double-stranded RNA molecule which down-regulates or silences (prevents) the expression of a gene/mRNA of its endogenous or cellular counterpart. The mechanism of RNA interference is detailed infra.

[0004] siRNA has been successfully used for inhibition in primates; (for further details see Tolentino et al., 2004. Retina 24(1):132-138). Several studies have revealed that siRNA therapeutic agents are effective in vivo in both mammals and in humans. Bitko et al., have shown that specific siRNA molecules directed against the respiratory syncytial virus (RSV) nucleocapsid N gene are effective in treating mice when administered intranasally (Bitko et al., 2005. Nat. Med. 11(1):50-55). Reviews of the use of siRNA as a therapeutic agent recently published (see for example Barik 2005. J. Mol. Med. 83:764-773 and Dykxhoorn et al., 2006. Gene Therapy 13:541-552). In addition, clinical studies with short siRNAs that target the VEGFR1 receptor for the treatment of Age-Related Macular Degeneration (AMD) have been conducted in human patients. (Kaiser, 2006. Am. J. Ophthalmol. 142(4):660-8).

Chemically Modified siRNA

[0005] The selection and synthesis of siRNA corresponding to known genes has been widely reported; (see for example Ui-Tei et al., 2006. J Biomed Biotechnol.; 2006:65052; Chalk et al., 2004. BBRC. 319(1): 264-74; Sioud & Leirdal, 2004. Met. Mol. Biol.; 252:457-69; Levenkova et al., 2004, Bioinform. 20(3):430-2; Ui-Tei et al., 2004. NAR 32(3):936-48).

[0006] For examples of the use of, and production of, modified siRNA see for example Braasch et al., 2003. Biochem., 42(26):7967-75; Chiu et al., 2003, RNA, 9(9):1034-48; PCT publications WO 2004/015107 (atugen AG) and WO 02/44321 (Tuschl et al). U.S. Pat. Nos. 5,898,031 and 6,107,094 teach chemically modified oligomers. US patent publication 2005/0080246 relates to oligomeric compounds having an alternating motif. US patent publication 2005/0042647 describes dsRNA compounds having chemically modified internucleoside linkages.

[0007] The inclusion of a 5′-phosphate moiety was shown to enhance activity of siRNAs in Drosophila embryos (Boutla, et al., 2001, Curr. Biol. 11:1776-1780) and is required for siRNA function in human HeLa cells (Schwarz et al., 2002, Mol. Cell, 10,:537-548).

[0008] Amarzguoui et al., (2003, NAR, 31(2):589-595) showed that siRNA activity depended on the positioning of the 2′-O-methyl modifications. Holen et al (2003, NAR, 31(9):2401-2407) report that an siRNA having small numbers of 2′-O-methyl modified nucleosides gave good activity compared to wild type but that the activity decreased as the numbers of 2′-O-methyl modified nucleosides was increased. Chiu and Rana (2003, RNA, 9:1034-1048) teach that incorporation of 2′-O-methyl modified nucleosides in the sense or antisense strand (fully modified strands) severely reduced siRNA activity relative to unmodified siRNA. The placement of a 2′-O-methyl group at the 5′-terminus on the antisense strand was reported to severely limit activity whereas placement at the 3′-terminus of the antisense and at both termini of the sense strand was tolerated (Czauderna et al., 2003, NAR, 31(11), 2705-2716).

[0009] PCT Patent Publication Nos. PCT/IL2008/000248 and PCT/IL2008/001197 assigned to the assignee of the present invention disclose motifs useful in the preparation of chemically modified siRNA compounds.

### RTP801L

[0010] Gene RTP801 (REDD1, DDIT4), was first reported by the assignee of the instant application. U.S. Pat. Nos. 6,455,674, 6,555,667, and 6740738, all assigned to the assignee of the instant application, disclose and claim per se the RTP801 polynucleotide and polypeptide, and antibodies directed toward the polypeptide. RTP801 represents a unique gene target for hypoxia-inducible factor-1 (HIF-1) that may regulate hypoxia-induced pathogenesis independent of growth factors such as VEGF. Further discoveries relating to gene RTP801, as discovered by the assignee of the instant application, were reported in Shoshani, et al. 2002. Mol. Cell. Biol., 22(7):2283-2293; this paper, co-authored by the inventor of the present invention, details the discovery of the RTP801 gene. Gene RTP801L, so named because of its resemblance to RTP801, was also first reported by the assignee of the instant application, and given Pubmed accession No. NM_{—}145244 subsequent to said report.

[0011] While RTP801 and RTP801L share sequence homology of about 65% at the amino acid level, indicating a possible similarity of function, and while the assignee of the present invention has found that both RTP801 and RTP801L interact with TSC2 and affect the mTOR pathway, the inventors of the present invention have found that the embryological expression pattern of the two polypeptides differs, and that, contrary to RTP801, RTP801L is not induced by hypoxia in all conditions which induce RTP801 expression; it is, however, induced in MEFs as a result of H₂O₂ treatment (hypoxia treatment), and the induction follows kinetics similar to those of RTP801 expression induction under the same conditions. Additionally, the inventors of the present invention have found that RTP801 polypeptide is more abundantly expressed than RTP801L. Thus, RTP801L may serve as a target in the treatment of conditions for which RTP801 is a target, and may have the added benefit of a similar, yet different, target.

[0012] The following patent applications and publications give aspects of background information relating to RTP801L: Patent application/publication Nos. EP1580263, WO2003029271, WO2001096391, WO2003087768, WO2004048938, WO2005044981, WO2003025138, WO2002068579, EP1104808 and CA2343602 all disclose a nucleic acid or polypeptide which is homologous to RTP801L. Various groups have studied the mechanism of action of RTP801L (Corradetti et al., 2005. J Biol. Chem. 280(11):9769-72; Pisani et al., 2005. BBRC 326(4):788-93; Cuaz-perolin et al., 2004 Arterioscler Thromb Vasc Biol. 24(10):1830-5; Sofer et al., 2005 Mol Cell Biol. 25(14):5834-45).

[0013] Inhibitors of RTP801L are disclosed in PCT patent publication WO 2007/141796, assigned to the assignee of the present invention and incorporated herein by reference in its entirety. Use of those inhibitors in treating numerous indications is disclosed therein.

### SUMMARY OF THE INVENTION

[0014] The present invention relates in part to chemically modified RTP801L siRNA, and in particular to chemically modified RTP801L siRNA oligonucleotides having sense and antisense sequences set forth in Tables A-F. The chemically modified siRNA compounds disclosed herein are useful in down regulating RTP801L expression. The compounds according to the present invention exhibit properties that render them useful as therapeutic agents for treatment of a subject suffering from a disease or disorder associated with RTP801L expression. Specifically the compounds exhibit high activity, and/or serum stability and/or reduced off-target effects and/or reduced adverse immune response as compared to an unmodified siRNA compound. The present invention additionally provides novel RTP801L siRNA oligonucleotide pairs shown in Tables B-F and set forth in SEQ ID NOS:1852-6927. PCT patent publication WO 2007/141796, incorporated by reference herein, discloses the oligonucleotide pairs shown in Table A set forth in SEQ ID NO: 2-1851.

[0015] The present invention provides pharmaceutical compositions comprising one or more such oligonucleotides. The present invention further relates to methods for treating or preventing the incidence or severity of various diseases or conditions in a subject in need thereof wherein the disease or condition and/or symptoms associated therewith is selected from the group consisting of an ophthalmic disease or condition, a respiratory disease, an ischemic disease, a microvascular disease, an angiogenesis- and an apoptosis-related condition, a hearing impairment or any other disease, condition or combination of conditions as disclosed herein. Such methods involve administering to a mammal in need of such treatment a prophylactically or therapeutically effective amount of one or more such chemically modified siRNA compound, which inhibits or reduces expression or activity of RTP801L.

[0016] In one aspect the present invention provides a compound having the following structure:

| | |
|---|---|
| 5′ (N)ₓ-Z 3′ | (antisense strand) |
| 3′ Z′-(N′)_{y}-z″ 5′ | (sense strand) |

wherein each of N and N′ is a ribonucleotide which may be unmodified or modified, or an unconventional moiety;
wherein each of (N)x and (N′)y is an oligonucleotide in which each consecutive N or N′ is joined to the next N or N′ by a covalent bond;
wherein Z and Z′ may be present or absent, but if present is independently 1-5 consecutive nucleotides covalently attached at the 3′ terminus of the strand in which it is present;
wherein z″ may be present or absent, but if present is a capping moiety covalently attached at the 5′ terminus of (N′)y;
each of x and y is independently an integer between 18 and 40;
wherein the sequence of (N)x is substantially complementary to the sequence of (N′)y; and the sequence of (N′)y is substantially identical to any one of the sense sequences set forth in any one of Tables B-F.

[0017] In certain preferred embodiments the present invention provides an siRNA compound comprising an antisense strand (N)x and its substantially complementary sense strand (N′)y, set forth in any one of SEQ ID NOS:1852-6927. The siRNA compounds consist of unmodified ribonucleotides or a combination of unmodified ribonucleotides and ribonucleotides and or unconventional moieties.

[0018] In some embodiments the chemically modified siRNA compounds according to the present invention comprise the oligonucleotides disclosed in Tables B-F.

[0019] In some embodiments, the present invention provides a chemically modified siRNA compound having the following structure:

| | |
|---|---|
| 5′ (N)x-Z 3′ | antisense strand |
| 3′ Z′-(N′)y-z″ 5′ | sense strand |

wherein each of N and N′ is a nucleotide selected from an unmodified ribonucleotide and a modified ribonucleotide;
wherein each of (N)x and (N′)y is an oligomer in which each consecutive ribonucleotide is joined to the next ribonucleotide by a covalent bond;
wherein each of x and y is independently an integer between 18 and 40;
wherein in each of (N)x and (N′)y the ribonucleotides alternate between modified ribonucleotides and unmodified ribonucleotides each modified ribonucleotide being modified so as to have a 2′-O-methyl on its sugar and the ribonucleotide located at the middle position of (N)x being unmodified and the ribonucleotide located at the middle position of (N′)y being modified;
wherein each of Z and Z′ may be present or absent, but if present is 1-5 deoxyribonucleotides covalently attached at the 3′ terminus of the oligomer to which it is attached;
wherein the sequence of (N)x is substantially complementary to the sequence of (N′)y; and wherein the sequence of (N′)y is substantially identical to any one of the sense sequences set forth in any one of Tables B-F.

[0020] The present invention provides additional chemically modified RTP801L siRNA compounds. In some embodiments, the present invention provides a compound having the following structure:

| | |
|---|---|
| 5′ (N)x-Z 3′ | (antisense strand) |
| 3′ Z′-(N′)y-z″ 5′ | (sense strand) |

wherein each of N and N′ is a ribonucleotide which may be unmodified or modified, or an unconventional moiety;
wherein each of (N)x and (N′)y is an oligonucleotide in which each consecutive N or N′ is joined to the next N or N′ by a covalent bond;
wherein Z and Z′ may be present or absent, but if present is independently 1-5 consecutive nucleotides covalently attached at the 3′ terminus of the strand in which it is present;
wherein z″ may be present or absent, but if present is a capping moiety covalently attached at the 5′ terminus of (N′)y;
wherein each of x and y is independently an integer between 18 and 40;
wherein (N)x comprises modified and unmodified ribonucleotides, each modified ribonucleotide having a 2′-O-methyl on its sugar, wherein N at the 3′ terminus of (N)x is a modified ribonucleotide, (N)x comprises at least five alternating modified ribonucleotides beginning at the 3′ end and at least nine modified ribonucleotides in total and each remaining N is an unmodified ribonucleotide;
wherein in (N′)y at least one unconventional moiety is present, which unconventional moiety may be a modified or unmodified deoxyribonucleotide, a mirror nucleotide, or a nucleotide joined to an adjacent nucleotide by a 2′-5′ internucleotide phosphate bond;
wherein the sequence of (N)x is substantially complementary to the sequence of (N′)y; and the sequence of (N′)y is substantially identical to a sequence of identical length of consecutive ribonucleotides in the mRNA set forth in SEQ ID NO:1.

[0021] In various embodiments the compound of the invention comprises an antisense sequence (N)x present in any one of Tables A-F, set forth in SEQ ID NOS:2-6927. In certain embodiments (N)x comprising the oligonucleotide set forth in SEQ ID NO:999 or SEQ ID NO:1000. In other embodiments (N)x comprising the oligonucleotide set forth in SEQ ID NO:6914 or SEQ ID NO:6915.

[0022] In some embodiments the covalent bond joining each consecutive N or N′ is a phosphodiester bond. In various embodiments all the covalent bonds are phosphodiester bonds.

[0023] In various embodiments x=y and each of x and y is 19, 20, 21, 22 or 23. In some embodiments x=y=23. In other embodiments x=y=19.

[0024] In one embodiment of the above structure, the compound comprises at least one mirror nucleotide at one or both termini in (N′)y. In various embodiments the compound comprises two consecutive mirror nucleotides, one at the 3′ penultimate position and one at the 3′ terminus in (N′)y. In one preferred embodiment x=y=19 and (N′)y comprises an L-deoxyribonucleotide at position 18.

[0025] In some embodiments the mirror nucleotide is selected from an L-ribonucleotide and an L-deoxyribonucleotide. In various embodiments the mirror nucleotide is an L-deoxyribonucleotide. In some embodiments y=19 and (N′)y, consists of unmodified ribonucleotides at positions 1-17 and 19 and one L-DNA at the 3′ penultimate position (position 18). In other embodiments y=19 and (N′)y consists of unmodified ribonucleotides at position 1-16 and 19 and two consecutive L-DNA at the 3′ penultimate position (positions 17 and 18).

[0026] In another embodiment of the above structure, (N′)y further comprises one or more nucleotides containing an intra-sugar bridge at one or both termini.

[0027] In another embodiment of the above structure, (N′)y comprises at least two consecutive nucleotide joined together to the next nucleotide by a 2′-5′ phosphodiester bond at one or both termini. In certain preferred embodiments in (N′)y the 3′ penultimate nucleotide is linked to the 3′ terminal nucleotide with a 2′-5′ phosphodiester bridge.

[0028] In certain preferred embodiments the compound of the invention is a blunt-ended (z″, Z and Z′ are absent), double stranded oligonucleotide structure, x=y and x=19 or 23, wherein (N′)y comprises unmodified ribonucleotides in which three consecutive nucleotides at the 3′ terminus are joined together by two 2′-5′ phosphodiester bonds; and an antisense strand (AS) of alternating unmodified and 2′-O methyl sugar-modified ribonucleotides.

[0029] In additional embodiments (N)x comprises modified ribonucleotides in alternating positions wherein each N at the 5′ and 3′ termini are modified in their sugar residues and the middle ribonucleotide is not modified, e.g. ribonucleotide in position 10 in a 19-mer strand or position 12 in a 23-mer strand.

[0030] In some embodiments, neither (N)x nor (N′)y are phosphorylated at the 3′ and 5′ termini. In other embodiments either or both (N)x and (N′)y are phosphorylated at the 3′ termini.

[0031] In various embodiments the compound comprises an antisense and sense oligonucleotide pair present in any one of Tables A-G set forth in SEQ ID NOS:2-6927.

[0032] In certain embodiments for all the above-mentioned structures, the compound is blunt ended, for example wherein both Z and Z′ are absent. In an alternative embodiment, the compound comprises at least one 3′ overhang, wherein at least one of Z or Z′ is present. Z and Z′ can independently comprise one or more covalently linked modified or non-modified nucleotides, for example inverted dT or dA; dT, LNA, mirror nucleotide and the like. In some embodiments each of Z and Z′ are independently selected from dT and dTdT.

[0033] In some embodiments the present invention provides an expression vector comprising an antisense sequence present in any one of Tables B-F.

[0034] In a second aspect the present invention provides a pharmaceutical composition comprising one or more compounds of the present invention, in an amount effective to inhibit RTP801L human gene expression and a pharmaceutically acceptable carrier.

[0035] In another aspect, the present invention relates to a method for the treatment of a subject in need of treatment for a disease or disorder or symptoms or conditions associated with the disease or disorder, associated with the expression of RTP801L comprising administering to the subject an amount of an siRNA which reduces or inhibits expression of RTP801L.

[0036] More specifically, the present invention provides methods, compounds and compositions useful in therapy for treating a subject suffering from acute renal failure (ARF), hearing loss, glaucoma, acute respiratory distress syndrome (ARDS) and other acute lung and respiratory injuries, injury (e.g. ischemia-reperfusion injury) in organ transplant including lung, kidney, bone marrow, heart, pancreas, cornea or liver transplantation, nephrotoxicity, spinal cord injury, pressure sores, dry eye syndrome, oral mucositis and chronic obstructive pulmonary disease (COPD). The methods of the invention comprise administering to the subject one or more siRNA compounds which inhibit expression of RTP801L in a therapeutically effective dose so as to thereby treat the patient.

[0037] According to one embodiment the compound consists of an antisense strand having an oligomer sequence set forth in SEQ ID NO:1000 and a sense strand having an oligomer sequence set forth in SEQ ID NO:75. According to one embodiment the compound consists of an antisense strand having an oligomer sequence set forth in SEQ ID NO:999 and a sense strand having an oligomer sequence set forth in SEQ ID NO:74. According to another embodiment, the compound consists of an antisense strand having an oligomer sequence set forth in SEQ ID NO:6914 and a sense strand having an oligomer sequence set forth in SEQ ID NO:6898 (DDIT4L_{—}14 in Table F). According to another embodiment, the compound consists of an antisense strand having an oligomer sequence set forth in SEQ ID NO:6915 and a sense strand having an oligomer sequence set forth in SEQ ID NO:6899 (DDIT4L_{—}15 in Table F).

[0038] In various embodiments the siRNA compound is selected from any one of the compounds shown in Table G (FIG. 3).

[0039] In certain preferred embodiments the siRNA compounds indicated above are modified so at to have antisense strand comprising alternating 2′OMe and unmodified ribonucleotides, and a sense strand comprising unmodified ribonucleotides and an L-DNA moiety at position 18 or at positions 17 and 18. In some embodiments the sense strand further includes a deoxyribonucleotide at position 15.

[0040] In another aspect the present invention provides a pharmaceutical composition comprising on or more RTP801L siRNA inhibitors of the invention; and a pharmaceutically acceptable excipient.

[0041] In another aspect, the present invention provides a method of treating a patient suffering from a microvascular disorder, macular degeneration or a respiratory disorder, comprising administering to the patient a pharmaceutical composition comprising one or more RTP801L inhibitor.

[0042] Another embodiment of the present invention concerns a method for treating a patient suffering from COPD, comprising administering to the patient a pharmaceutical composition comprising a therapeutically effective amount of one or more siRNA RTP801L inhibitor. In one embodiment the inhibitor is selected from the group consisting of an siRNA molecule, an antisense molecule, and a ribozyme or a combination thereof.

[0043] Another embodiment of the present invention concerns a method for treating a patient suffering from Acute Lung Injury (ALI), comprising administering to the patient a pharmaceutical composition comprising a therapeutically effective amount of one or more RTP801L inhibitor. In one embodiment the inhibitor selected from the group consisting of an siRNA molecule, an antisense molecule, and a ribozyme or a combination thereof.

[0044] Another embodiment of the present invention concerns a method for treating a patient suffering from macular degeneration, comprising administering to the patient a pharmaceutical composition comprising a therapeutically effective amount of one or more RTP801L inhibitor. In one embodiment the inhibitor is an siRNA molecule, an antisense molecule, or a ribozyme or a combination thereof.

[0045] Another embodiment of the present invention concerns a method for treating a patient suffering from a microvascular disorder, comprising administering to the patient a pharmaceutical composition comprising a therapeutically effective amount of one or more RTP801L inhibitor. In one embodiment the inhibitor is an siRNA molecule, an antisense molecule, or a ribozyme or a combination thereof.

[0046] An additional embodiment of the present invention provides for the use of a therapeutically effective amount of an RTP801L inhibitor for the preparation of a medicament for promoting recovery in a patient suffering from a respiratory disorder. In one embodiment the respiratory disorder is COPD and the inhibitor is preferably one or more siRNA. In another embodiment the respiratory disorder is ALI and the inhibitor is preferably one or more siRNA.

[0047] An additional embodiment of the present invention provides for the use of a therapeutically effective dose of one or more RTP801L inhibitor for the preparation of a medicament for promoting recovery in a patient suffering from macular degeneration. In one embodiment the macular degeneration is AMD and the inhibitor is preferably one or more siRNA.

[0048] An additional embodiment of the present invention provides for the use of a therapeutically effective dose of one or more RTP801L inhibitor for the preparation of a medicament for promoting recovery in a patient suffering from glaucoma. In one embodiment the inhibitor is preferably one or more siRNA. In various embodiments the present invention is useful in therapy for treating a patient in need of neuroprotection. In some embodiments the siRNA compound is therapeutically effective in neuroprotection of the optic nerve.

[0049] An additional embodiment of the present invention provides for the use of a therapeutically effective dose of one or more RTP801L inhibitor for the preparation of a medicament for promoting recovery in a patient suffering from an eye disorder secondary to diabetes. In one embodiment the inhibitor is preferably one or more siRNA.

[0050] An additional embodiment of the present invention provides for the use of a therapeutically effective amount of one or more RTP801L inhibitor for the preparation of a medicament for promoting recovery in a patient suffering from a microvascular disorder. In one embodiment the microvascular disorder is diabetic retinopathy and the inhibitor is preferably one or more siRNA. In another embodiment the disorder is Acute Renal Failure and the inhibitor is preferably one or more siRNA.

[0051] The present invention also relates generally to methods and compositions for treating or preventing the incidence or severity of hearing impairment (or balance impairment), particularly hearing impairment associated with cell death of the inner ear hair cells. The methods and compositions involve administering to a mammal in need of such treatment a prophylactically or therapeutically effective amount of one or more compounds which down-regulate expression of the RTP801L gene, particularly novel small interfering RNAs (siRNAs).

[0052] More specifically, the present invention provides methods and compositions for treating a patient suffering from hearing impairment, or other oto-pathologies associated with cell death of inner ear hair cells. Such oto-pathologies may be the result of acoustic trauma, mechanical trauma, age (presbycusis) or ototoxin-induced hearing loss. The methods of the invention comprising administering to the patient one or more compounds which down-regulate expression of the RTP801L gene, particularly siRNAs that inhibit RTP801L typically as a pharmaceutical composition, in a therapeutically effective dose so as to thereby treat the patient.

[0053] In one embodiment, the present invention provides for improved compositions and methods for treatments requiring administration of a pharmaceutical drug having an ototoxic, hearing-impairing side-effect, in combination with a therapeutically effective amount of one or more siRNA molecules that inhibit RTP801L, to treat or prevent the ototoxicity induced by the pharmaceutical drug. The compositions of the invention can be administered at a suitable interval(s) either prior to, subsequent to, or substantially concurrent with the administration of the ototoxic, hearing-impairing drug that induces inner ear apoptotic tissue damage.

[0054] Accordingly, it is an object of the invention to provide an improved composition containing a therapeutically effective amount of one or more siRNA molecules that inhibit RTP801L in combination with an ototoxic, hearing-impairing pharmaceutical drug for administration to a mammal. Said combination drugs may be administered separately; the siRNA molecules that inhibit RTP801L would then be administered locally while the ototoxic, hearing-impairing pharmaceutical drug is administered systemically. The siRNA molecules may be administered prior to, simultaneously with or subsequent to the ototoxic drug. Such combination compositions can further contain a pharmaceutically acceptable carrier. The pharmaceutical composition will have lower ototoxicity than the ototoxic pharmaceutical alone, and preferably, will have a higher dosage of the ototoxic pharmaceutical than typically used. Examples of such improved compositions include cisplatin or other ototoxic neoplastic agent or an aminoglycoside antibiotic(s) in combination with the therapeutically effective amount of one or more siRNA molecules that inhibit RTP801L.

[0055] Still further, the invention relates to the use of the compositions of the invention in cases where diuretics are needed. The present invention provides a solution to the art that has long sought a therapy and a medicament which can treat the ototoxic effects currently associated with certain diuretics, and particular with the more popular and commonly used loop-diuretics, without sacrificing their diuretic effectiveness.

[0056] Still further, the invention relates to the use of the compositions of the invention in cases where quinine or quinine-like compounds are needed. The present invention provides a solution to the art that has long sought a therapy and a medicament which can treat the ototoxic effects currently associated with certain quinines without sacrificing their effectiveness.

[0057] The present invention further relates to methods and compositions for treating or preventing the incidence or severity of pressure sores. The methods and compositions involve administering to a mammal in need of such treatment a prophylactically or therapeutically effective amount of one or more compounds which down-regulate expression of the RTP801L gene, particularly novel small interfering RNAs (siRNAs).

[0058] Further, the present invention relates to methods and compositions for the treatment of any ischemic or ischemia-reperfusion injuries or conditions, as described herein. Said methods and compositions involve administering to a mammal in need of such treatment a prophylactically or therapeutically effective amount of one or more compounds which down-regulate expression of the RTP801L gene, particularly novel small interfering RNAs (siRNAs).

### BRIEF DESCRIPTION OF THE FIGURES

[0059] FIG. 1 provides the polynucleotide sequence of REDD2 full length mRNA (SEQ ID NO:1);

[0060] FIG. 2 provides Table F, a list of certain preferred siRNA RTP801L oligonucleotide pairs.

[0061] FIG. 3a-3c provide Table G, a list of certain preferred chemically modified RTP801L siRNA.

[0062] FIG. 4 details the activity results of RTP801L siRNAs on the endogenous RTP801L gene in wild type MEF cells following H₂O₂ treatment;

[0063] FIG. 5 demonstrates dose dependent activity of RTP801L siRNAs as measured in 801 wt MEF cells;

[0064] FIG. 6 shows activity results of RTP801L siRNAs on the endogenous RTP801L gene in wt 293T cells;

[0065] FIG. 7 demonstrates dose dependent activity of RTP801L siRNA as measured in 293T cells.

[0066] FIG. 8 Shows structure, activity and stability results for certain RTP801L siRNA compounds of the present invention.

[0067] FIG. 9 shows IC50 results for an siRNA compound of the present invention.

### DETAILED DESCRIPTION OF THE INVENTION

[0068] The present invention, relates to novel oligonucleotide compounds useful in inhibiting the RTP801L gene for the treatment of eye diseases, respiratory disorders, microvascular disorders, hearing disorders and ischemic conditions, inter alia. As will be described herein, the preferred inhibitors to be used with the present invention are chemically modified siRNA.

[0069] Compounds and compositions comprising same which inhibit RTP801L are discussed herein at length, and any of said compounds and/or compositions may be beneficially employed in the treatment of a patient suffering from a disease or disorder associated with RTP801L expression.

[0070] The siRNAs of the present invention possess structures and modifications which may increase activity, increase stability, and or minimize toxicity; the novel modifications of the siRNAs of the present invention can be beneficially applied to double stranded RNA useful in preventing or attenuating RTP801L expression.

[0071] According to one aspect the present invention provides inhibitory oligonucleotide compounds comprising unmodified and modified nucleotides and or unconventional moieties. The compound comprises at least one modified nucleotide selected from the group consisting of a sugar modification, a base modification and an internucleotide linkage modification and may contain DNA, and modified nucleotides such as LNA (locked nucleic acid), ENA (ethylene-bridged nucleic acid, PNA (peptide nucleic acid), arabinoside, PACE, mirror nucleotide, or nucleotides with a 6 carbon sugar.

[0072] In one embodiment the compound comprises a 2′ modification on the sugar moiety of at least one ribonucleotide (“2′ sugar modification”). In certain embodiments the compound comprises 2′O-alkyl or 2′-fluoro or 2′O-allyl or any other 2′ modification, optionally on alternate positions. Other stabilizing modifications are also possible (e.g. terminal modifications). In some embodiments the backbone of the oligonucleotides is modified and comprises phosphate-D-ribose entities but may also contain thiophosphate-D-ribose entities, triester, thioate, 2′-5′ bridged backbone (also may be referred to as 5′-2′), PACE or any other type of modification.

[0073] Other modifications include terminal modifications on the 5′ and/or 3′ part of the oligonucleotides. Such terminal modifications may be lipids, peptides, sugars or other molecules.

[0074] Further, an additional embodiment of the present invention concerns a method for treating a patient suffering from a microvascular disorder, an eye disease, a respiratory disorder, a hearing disorder or a spinal cord injury or other wound, comprising administering to the patient a pharmaceutical composition comprising a therapeutically effective dose of an RTP801L inhibitor comprising an siRNA molecule, optionally an siRNA molecule detailed in any one of Tables A-G, in a dosage and over a period of time so as to thereby treat the patient.

[0075] An additional method for treating a patient suffering from a microvascular disorder, an eye disease, a respiratory disorder, a hearing disorder or a spinal cord injury or other wound is provided, comprising administering to the patient a pharmaceutical composition comprising a therapeutically effective dose of an RNA molecule which targets the RTP801L gene mRNA in a dosage and over a period of time so as to thereby treat the patient. The RNA molecule may be an siRNA molecule, such as an siRNA molecule detailed in any one of Tables A-G, preferably siRNA Nos:72 or 73. In one embodiment, the compound consists of an antisense strand having an oligomer sequence set forth in SEQ ID NO:6914 and a sense strand having an oligomer sequence set forth in SEQ ID NO:6898 (DDIT4L_{—}14 in Table F). According to another embodiment, the compound consists of an antisense strand having an oligomer sequence set forth in SEQ ID NO:6915 and a sense strand having an oligomer sequence set forth in SEQ ID NO:6899 (DDIT4L_{—}15 in Table F). In certain preferred embodiments the siRNA is modified so at to have antisense strand comprising alternating 2′OMe and unmodified ribonucleotides, and a sense strand comprising unmodified ribonucleotides and an L-DNA moiety at position 18 or at positions 17 and 18. In some embodiments the sense strand further includes a deoxyribonucleotide at position 15.

[0076] The present invention further provides a method for treating a patient suffering from a microvascular disorder, an eye disease, an ischemic disease, a kidney disorder, a respiratory disorder, a hearing disorder or a spinal cord injury or other wound or any of the conditions disclosed herein, comprising administering to the patient a pharmaceutical composition comprising a therapeutically effective dose of an siRNA molecule which targets the RTP801L gene mRNA, optionally an siRNA molecule detailed in any one of Tables A-G, in a dosage and over a period of time so as to thereby treat the patient. Further, the eye disease may be macular degeneration such as age-related macular degeneration (AMD) or glaucoma; the microvascular disorder may be diabetic retinopathy or acute renal failure; the ischemic disease may be ischemia-reperfusion or organ transplant related; the kidney disorder may be nephrotoxicity; the respiratory disorder may be COPD or ALI; and the hearing disorder may be noise-induced deafness, chemically induced deafness such as cisplatin-induced deafness or age-related deafness.

[0077] The present invention additionally relates to the use of the novel siRNAs disclosed herein in the treatment of hearing impairment in which inhibition of RTP801L expression is beneficial. In one embodiment, the present invention constitutes a method for treating a mammal having or prone to a hearing (or balance) impairment or treating a mammal prophylactically in conditions where inhibition of RTP801L expression is beneficial. The method of this embodiment of the present invention would prevent or reduce the occurrence or severity of a hearing (or balance) impairment that would result from inner ear cell injury, loss, or degeneration, in particular caused by an ototoxic agent or by aging. In this embodiment, the method of the invention includes administering a therapeutically effective amount of one or more compounds which down-regulate expression of the RTP801L gene, particularly the novel siRNAs of the present invention.

[0078] In one embodiment, it is the object of the present invention to provide a method for treating a mammal, to prevent, reduce, or treat a hearing impairment, disorder or imbalance, preferably an ototoxin-induced hearing condition, by administering to a mammal in need of such treatment a composition of the invention. One embodiment is a method for treating a hearing disorder or impairment wherein the ototoxicity results from administration of a therapeutically effective amount of an ototoxic pharmaceutical drug. Typical ototoxic drugs are chemotherapeutic agents, e.g. antineoplastic agents, and antibiotics. Other possible candidates include loop-diuretics, quinines or a quinine-like compound, and salicylate or salicylate-like compounds. These methods are especially effective when the ototoxic compound is an antibiotic, preferably an aminoglycoside antibiotic. Ototoxic aminoglycoside antibiotics include but are not limited to neomycin, paromomycin, ribostamycin, lividomycin, kanamycin, amikacin, tobramycin, viomycin, gentamycin, sisomycin, netilmycin, streptomycin, dibekacin, fortimycin, and dihydrostreptomycin, or combinations thereof. Particular antibiotics include neomycin B, kanamycin A, kanamycin B, gentamycin C1, gentamycin C1a, and gentamycin C2. The methods of the invention are also effective when the ototoxic compound is a neoplastic agent such as vincristine, vinblastine, cisplatin and cisplatin-like compounds and taxol and taxol-like compounds

[0079] In some embodiments aimed at treating or preventing a hearing disorder, the composition of the invention is co-administered with an ototoxin. For example, an improved method is provided for treatment of infection of a mammal by administration of an aminoglycoside antibiotic, the improvement comprising administering a therapeutically effective amount of one or more compounds which down-regulate expression of the RTP801L gene particularly novel siRNAs, to the patient in need of such treatment to reduce or prevent ototoxin-induced hearing impairment associated with the antibiotic. The compounds which reduce or prevent the ototoxin-induced hearing impairment, particularly the novel siRNAs are preferably administered locally within the inner ear. In yet another embodiment is provided an improved method for treatment of cancer in a mammal by administration of a chemotherapeutic compound, the improvement comprises administering a therapeutically effective amount of a composition of the invention to the patient in need of such treatment to reduce or prevent ototoxin-induced hearing impairment associated with the chemotherapeutic drug. In another embodiment the methods of treatment are applied to hearing impairments resulting from the administration of a chemotherapeutic agent to treat its ototoxic side effect. Ototoxic chemotherapeutic agents amenable to the methods of the invention include, but are not limited to an antineoplastic agent, including cisplatin or cisplatin-like compounds, taxol or taxol-like compounds, and other chemotherapeutic agents believed to cause ototoxin-induced hearing impairments, e.g., vincristine, an antineoplastic drug used to treat hematological malignancies and sarcomas. Cisplatin-like compounds include carboplatin (Paraplatin®), tetraplatin, oxaliplatin, aroplatin and transplatin inter alia. In another embodiment the methods of the invention are applied to hearing impairments resulting from the administration of quinine and its synthetic substitutes, typically used in the treatment of malaria, to treat its ototoxic side-effect. In another embodiment the methods of the invention are applied to hearing impairments resulting from administration of a diuretic. Diuretics, particularly “loop” diuretics, i.e. those that act primarily in the Loop of Henle, are candidate ototoxins. Illustrative examples, not limiting to the invention method, include furosemide, ethacrylic acid, and mercurials. Diuretics are typically used to prevent or eliminate edema. Diuretics are also used in nonedematous states for example hypertension, hypercalcemia, idiopathic hypercalciuria, and nephrogenic diabetes insipidus.

[0080] In another embodiment, the methods of the invention are applied to treating or preventing the incidence or severity of pressure sores. The methods and compositions involve administering to a mammal in need of such treatment a prophylactically or therapeutically effective amount of one or more compounds which down-regulate expression of the RTP801L gene, particularly novel small interfering RNAs (siRNAs). The compounds which treat or prevent the incidence or severity of pressure sores, particularly the novel siRNAs are preferably administered locally within the damaged area. The methods and compositions of the present invention are effective in the treatment and prevention of pressure sores or pressure ulcers developed when sustained pressure (usually from a bed or wheelchair) cuts off circulation to vulnerable parts of the body. The methods and compositions are effective in patients with diminished or absent sensation or who are debilitated, emaciated, paralyzed, or long bedridden. The compositions of the present invention are effective also in improving the healing of pressure sores using the compositions. The compositions may be used at any particular stage in the healing process including the stage before any healing has initiated or even before a specific sore is made (prophylactic treatment).

[0081] Other kinds of wounds to be treated according to the invention include i) general wounds such as, e.g., surgical, traumatic, infectious, ischemic, thermal, chemical and bullous wounds; ii) wounds specific for the oral cavity such as, e.g., post-extraction wounds, endodontic wounds especially in connection with treatment of cysts and abscesses, ulcers and lesions of bacterial, viral or autoimmunological origin, mechanical, chemical, thermal, infectious and lichenoid wounds; herpes ulcers, stomatitis aphthosa, acute necrotising ulcerative gingivitis and burning mouth syndrome are specific examples; and iii) wounds on the skin such as, e.g., neoplasm, burns (e.g. chemical, thermal), lesions (bacterial, viral, autoimmunological), bites and surgical incisions.

[0082] The methods and compositions of the present invention are also effective in the treatment and prevention of any chronic wounds including inter alia pressure sores, venous ulcers, and diabetic ulcers. In all these chronic wound types, the underlying precipitating event is a period of ischemia followed by a period of reperfusion. These ischemia-reperfusion events are usually repetitive, which means the deleterious effects of ischemia-reperfusion are potentiated and eventually sufficient to cause ulceration. For both pressure sores and diabetic foot ulcers, the ischemic event is the result of prolonged pressure sufficient to prevent tissue perfusion, and when the pressure is finally relieved, the reperfusion injury occurs. The present compositions are effective in inhibiting the damage caused by ischemia-reperfusion in chronic wounds.

[0083] The present compositions are also effective in other conditions associated with ischemia-reperfusion such as but not limited to: organ transplantation, intestinal and colon anastamoses, operations on large blood vessels, stitching detached limbs, balloon angioplasty or any cardiac surgery, stroke or brain trauma, limb transplantation, pulmonary hypertension, hypoxemia, and noncardiogenic pulmonary edema, acute renal failure, acute glaucoma, diabetic retinopathy, hypertensive retinopathy, and retinal vascular occlusion, cochlear ischemia, microvascular surgery and ischemic lesions in scleroderma.

[0084] The methods and compositions of the present invention are also effective in the treatment of acoustic trauma or mechanical trauma, preferably acoustic or mechanical trauma that leads to inner ear hair cell loss. Acoustic trauma to be treated in the present invention may be caused by a single exposure to an extremely loud sound, or following long-term exposure to everyday loud sounds above 85 decibels. Mechanical inner ear trauma to be treated in the present invention is for example the inner ear trauma following an operation of electronic device insertion in the inner ear. The compositions of the present invention prevent or minimize the damage to inner ear hair cells associated with the operation. The compounds which reduce or prevent the ototoxin-induced hearing impairment, particularly the novel siRNAs are preferably administered locally within the inner ear.

[0085] Additionally, as detailed above, the compound of the present invention can be used to treat any condition in which ischemia is involved, optionally ischemia-reperfusion. Such condition include ischemia or ischemia-reperfusion resulting from an angioplasty, cardiac surgery or thrombolysis; organ transplant; as a result of plastic surgery; during severe compartment syndrome; during re-attachment of severed limbs; as a result of multiorgan failure syndrome; in the brain as a result of stroke or brain trauma; in connection with chronic wounds such as pressure sores, venous ulcers and diabetic ulcers; during skeletal muscle ischemia or limb transplantation; as a result of mesenteric ischemia or acute ischemic bowel disease; respiratory failure as a result of lower torso ischemia, leading to pulmonary hypertension, hypoxemia, and noncardiogenic pulmonary edema; acute renal failure as observed after renal transplantation, major surgery, trauma, and septic as well as hemorrhagic shock; Sepsis; Retinal ischemia occurring as a result of acute vascular occlusion, leading to loss of vision in a number of ocular diseases such as acute glaucoma, diabetic retinopathy, hypertensive retinopathy, and retinal vascular occlusion; Cochlear ischemia; flap failure in microvascular surgery for head and neck defects; Raynaud's phenomenon and the associated digital ischemic lesions in scleroderma; spinal cord injury; vascular surgery; Traumatic rhabdomyolysis (crush syndrome); and myoglobinuria. Further, ischemia/reperfusion may be involved in the following conditions: hypertension, hypertensive cerebral vascular disease, rupture of aneurysm, a constriction or obstruction of a blood vessel—as occurs in the case of a thrombus or embolus, angioma, blood dyscrasias, any form of compromised cardiac function including cardiac arrest or failure, systemic hypotension, cardiac arrest, cardiogenic shock, septic shock, spinal cord trauma, head trauma, seizure, bleeding from a tumor; and diseases such as stroke, Parkinson's disease, epilepsy, depression, ALS, Alzheimer's disease, Huntington's disease and any other disease-induced dementia (such as HIV induced dementia for example). Additionally, an ischemic episode may be caused by a mechanical injury to the Central Nervous System, such as results from a blow to the head or spine. Trauma can involve a tissue insult such as an abrasion, incision, contusion, puncture, compression, etc., such as can arise from traumatic contact of a foreign object with any locus of or appurtenant to the head, neck, or vertebral column. Other forms of traumatic injury can arise from constriction or compression of CNS tissue by an inappropriate accumulation of fluid (for example, a blockade or dysfunction of normal cerebrospinal fluid or vitreous humor fluid production, turnover, or volume regulation, or a subdural or intracarnial hematoma or edema). Similarly, traumatic constriction or compression can arise from the presence of a mass of abnormal tissue, such as a metastatic or primary tumor.

[0086] “Treating a disease” refers to administering a therapeutic substance effective to ameliorate symptoms associated with a disease, to lessen the severity or cure the disease, or to prevent the disease from occurring. “Treatment” refers to both therapeutic treatment and prophylactic or preventative measures, wherein the object is to prevent or slow down (lessen) a disease or disorder.

[0087] A “therapeutically effective dose” refers to an amount of a pharmaceutical compound or composition which is effective to achieve an improvement in a patient or his physiological systems including, but not limited to, improved survival rate, more rapid recovery, or improvement or elimination of symptoms, and other indicators as are selected as appropriate determining measures by those skilled in the art.

[0088] The methods of treating the diseases disclosed herein and included in the present invention may include administering an RTP801L inhibitor in conjunction with an additional RTP801L inhibitor, a substance which improves the pharmacological properties of the active ingredient as detailed below, or an additional compound known to be effective in the treatment of the disease to be treated, such as macular degeneration, glaucoma, COPD, ALI, ARF, DR, cisplatin-induced deafness, and age-related deafness, inter alia. By “in conjunction with” is meant prior to, simultaneously or subsequent to. Further detail on exemplary conjoined therapies is given below.

[0089] In another embodiment, the present invention provides for the use of a therapeutically effective dose of an RTP801L inhibitor for the preparation of a medicament for promoting recovery in a patient suffering from macular degeneration, glaucoma, COPD, ALI, ARF, DR, cisplatin-induced deafness, age-related deafness or any eye disease, microvascular or respiratory condition or hearing disorder as detailed above, and the use of a therapeutically effective dose of an RTP801L inhibitor for the preparation of a medicament for treating said diseases and conditions. In this embodiment, the RTP801L inhibitor may comprise a polynucleotide which comprises consecutive nucleotides having a sequence which comprises an antisense sequence to the sequence set forth in FIG. 1 (SEQ ID No: 1). Additionally, the RTP801L inhibitor may be an expression vector comprising a polynucleotide having a sequence which is an antisense sequence to the sequence set forth in FIG. 1 (SEQ ID No:1). Additionally, the RTP801L inhibitor may be an RNA molecule which targets the RTP801L gene mRNA such as a ribozyme or an siRNA, optionally an siRNA comprising consecutive nucleotides having a sequence identical to any one of the sequences set forth in any one of Tables A-G (SEQ ID NOs:3-6927) and preferably, siRNA Nos:72 and 73 of Table A, or DDIT4L_{—}14 or DDIT4L_{—}15 in Table F.

[0090] Thus, according to the information disclosed herein, the RTP801L inhibitor to be used with any of the methods disclosed herein, in any of the uses disclosed herein and in any of the pharmaceutical compositions disclosed herein, may be selected from the group consisting of an siRNA molecule, a vector comprising an siRNA molecule, a vector which can express an siRNA molecule and any molecule which is endogenously processed into an siRNA molecule. As detailed herein, said siRNA molecule is preferably an siRNA comprising consecutive nucleotides having a sequence identical to any one of the sequences set forth in any one of Tables A-G and preferably siRNA Nos:72 and 73 of Table A, or DDIT4L_{—}14 or DDIT4L_{—}15 in Table F.

[0091] “Respiratory disorder” refers to conditions, diseases or syndromes of the respiratory system including but not limited to pulmonary disorders of all types including chronic obstructive pulmonary disease (COPD), acute lung injury (ALI), emphysema, chronic bronchitis, asthma and lung cancer, inter alia. Emphysema and chronic bronchitis may occur as part of COPD or independently. Conditions resulting from lung transplantation may also be viewed as such.

[0092] “Ischemic diseases/conditions” relates to any disease in which ischemia is involved, as well as ischemia-reperfusion injury and ischemia in connection with organ transplantation.

[0093] “Microvascular disorder” refers to any condition that affects microscopic capillaries and lymphatics, in particular vasospastic diseases, vasculitic diseases and lymphatic occlusive diseases. Examples of microvascular disorders include, inter alia: eye disorders such as Amaurosis Fugax (embolic or secondary to SLE), apla syndrome, Prot CS and ATIII deficiency, microvascular pathologies caused by IV drug use, dysproteinemia, temporal arteritis, anterior ischemic optic neuropathy, optic neuritis (primary or secondary to autoimmune diseases), glaucoma, von Hippel Lindau syndrome, corneal disease, corneal transplant rejection cataracts, Eales' disease, frosted branch angiitis, encircling buckling operation, uveitis including pars planitis, choroidal melanoma, choroidal hemangioma, optic nerve aplasia; retinal conditions such as retinal artery occlusion, retinal vein occlusion, retinopathy of prematurity, HIV retinopathy, Purtscher retinopathy, retinopathy of systemic vasculitis and autoimmune diseases, diabetic retinopathy, hypertensive retinopathy, radiation retinopathy, branch retinal artery or vein occlusion, idiopathic retinal vasculitis, aneurysms, neuroretinitis, retinal embolization, acute retinal necrosis, Birdshot retinochoroidopathy, long-standing retinal detachment; systemic conditions such as Diabetes mellitus, diabetic retinopathy (DR), diabetes-related microvascular pathologies (as detailed herein), hyperviscosity syndromes, aortic arch syndromes and ocular ischemic syndromes, carotid-cavernous fistula, multiple sclerosis, systemic lupus erythematosus, arteriolitis with SS-A autoantibody, acute multifocal hemorrhagic vasculitis, vasculitis resulting from infection, vasculitis resulting from Behget's disease, sarcoidosis, coagulopathies, neuropathies, nephropathies, microvascular diseases of the kidney, acute renal failure and ischemic microvascular conditions, inter alia.

[0094] Microvascular disorders may comprise a neovascular element. The term “neovascular disorder” refers to those conditions where the formation of blood vessels (neovascularization) is harmful to the patient. Examples of ocular neovascularization include: retinal diseases (diabetic retinopathy, diabetic Macular Edema, chronic glaucoma, retinal detachment, and sickle cell retinopathy); rubeosis iritis; proliferative vitreo-retinopathy; inflammatory diseases; chronic uveitis; neoplasms (retinoblastoma, pseudoglioma and melanoma); Fuchs' heterochromic iridocyclitis; neovascular glaucoma; corneal neovascularization (inflammatory, transplantation and developmental hypoplasia of the iris); neovascularization following a combined vitrectomy and lensectomy; vascular diseases (retinal ischemia, choroidal vascular insufficiency, choroidal thrombosis and carotid artery ischemia); neovascularization of the optic nerve; and neovascularization due to penetration of the eye or contusive ocular injury. All these neovascular conditions may be treated using the compounds and pharmaceutical compositions of the present invention.

[0095] “Eye disease” refers to refers to conditions, diseases or syndromes of the eye including but not limited to any conditions involving choroidal neovascularization (CNV), wet and dry AMD, ocular histoplasmosis syndrome, angiod streaks, ruptures in Bruch's membrane, myopic degeneration, ocular tumors, retinal degenerative diseases, glaucoma, ION, and retinal vein occlusion (RVO). Some conditions disclosed herein, such as DR, which may be treated according to the methods of the present invention have been regarded as either a microvascular disorder and an eye disease, or both, under the definitions presented herein.

[0096] Hearing impairments relevant to the invention may be due to end-organ lesions involving inner ear hair cells, e.g., acoustic trauma, viral endolymphatic labyrinthitis, Meniere's disease. Hearing impairments include tinnitus, which is a perception of sound in the absence of an acoustic stimulus, and may be intermittent or continuous, wherein there is diagnosed a sensorineural loss. Hearing loss may be due to bacterial or viral infection, such as in herpes zoster oticus, purulent labyrinthitis arising from acute otitis media, purulent meningitis, chronic otitis media, sudden deafness including that of viral origin, e.g., viral endolymphatic labyrinthitis caused by viruses including mumps, measles, influenza, chicken pox, mononucleosis and adenoviruses. The hearing loss can be congenital, such as that caused by rubella, anoxia during birth, bleeding into the inner ear due to trauma during delivery, ototoxic drugs administered to the mother, erythroblastosis fetalis, and hereditary conditions including Waardenburg's syndrome and Hurler's syndrome. The hearing loss can be noise-induced, generally due to a noise greater than 85 decibels (db) that damages the inner ear. Preferably, the hearing loss is caused by aging (presbycusis) or an ototoxic drug that affects the auditory portion of the inner ear, particularly inner ear hair cells. Incorporated herein by reference are Chapters 196, 197, 198 and 199 of The Merck Manual of Diagnosis and Therapy, 14th Edition, (1982), Merck Sharp & Dome Research Laboratories, N.J. and corresponding chapters in the most recent 16th edition, including Chapters 207 and 210) relating to description and diagnosis of hearing and balance impairments.

[0097] Hearing disorders or impairments (or balance impairment) to be treated or prevented in the context of the present invention are preferably, without being bound by theory, trauma-induced deafness, age-related deafness and ototoxin-induced inner ear hair cells apoptotic damage. Those in need of treatment include those already experiencing a hearing impairment, those prone to having the impairment, and those in which the impairment is to be prevented. Without being bound by theory, the hearing impairments may be due to apoptotic inner ear hair cell damage or loss, wherein the damage or loss is caused by infection, mechanical injury, loud sound, aging, or, in particular, chemical-induced ototoxicity. Ototoxins include therapeutic drugs including antineoplastic agents, salicylates, quinines, and aminoglycoside antibiotics, contaminants in foods or medicinals, and environmental or industrial pollutants. Typically, treatment is performed to prevent or reduce ototoxicity, especially resulting from or expected to result from administration of therapeutic drugs. Preferably a therapeutically effective composition is given immediately after the exposure to prevent or reduce the ototoxic effect. More preferably, treatment is provided prophylactically, either by administration of the composition prior to or concomitantly with the ototoxic pharmaceutical or the exposure to the ototoxin.

[0098] The hearing impairment may be induced by chemotherapy. In more detail, hearing impairment may be caused by chemotherapeutic agents such as etoposide, 5-FU (5-fluorouracil), cis-platinum, doxorubicin, a vinca alkaloid, vincristine, vinblastine, vinorelbine, taxol, cyclophosphamide, ifosfamide, chlorambucil, busulfan, mechlorethamine, mitomycin, dacarbazine, carboplatinum, thiotepa, daunorubicin, idarubicin, mitoxantrone, bleomycin, esperamicin A1, dactinomycin, plicamycin, carmustine, lomustine, tauromustine, streptozocin, melphalan, dactinomycin, procarbazine, dexamethasone, prednisone, 2-chlorodeoxyadenosine, cytarabine, docetaxel, fludarabine, gemcitabine, herceptin, hydroxyurea, irinotecan, methotrexate, oxaliplatin, rituxin, semustine, epirubicin, etoposide, tomudex and topotecan, or a chemical analog of one of these chemotherapeutic agents. The chemotherapeutic agents most likely to cause hearing impairment is cisplatinum (cisplatin) and cisplatin-like compounds.

[0099] By “ototoxin” in the context of the present invention is meant a substance that through its chemical action injures, impairs or inhibits the activity of the sound receptors of the nervous system related to hearing, which in turn impairs hearing (and/or balance). In the context of the present invention, ototoxicity includes a deleterious effect on the inner ear hair cells. Ototoxic agents that cause hearing impairments include, but are not limited to, neoplastic agents such as vincristine, vinblastine, cisplatin and cisplatin-like compounds, taxol and taxol-like compounds, dideoxy-compounds, e.g., dideoxyinosine; alcohol; metals; industrial toxins involved in occupational or environmental exposure; contaminants of food or medicinals; and over-doses of vitamins or therapeutic drugs, e.g., antibiotics such as penicillin or chloramphenicol, and megadoses of vitamins A, D, or B6, salicylates, quinines and loop diuretics. By “exposure to an ototoxic agent” is meant that the ototoxic agent is made available to, or comes into contact with, a mammal. Exposure to an ototoxic agent can occur by direct administration, e.g., by ingestion or administration of a food, medicinal, or therapeutic agent, e.g., a chemotherapeutic agent, by accidental contamination, or by environmental exposure, e.g., aerial or aqueous exposure.

[0100] An “inhibitor” is a compound which is capable of reducing the expression of a gene or the activity of the product of such gene to an extent sufficient to achieve a desired biological or physiological effect. The term “inhibitor” as used herein refers to one or more of an oligonucleotide inhibitor, including siRNA, shRNA, aptamers, antisense molecules, miRNA and ribozymes, as well as antibodies. The inhibitor may cause complete or partial inhibition.

[0101] The term “inhibit” as used herein refers to reducing the expression of a gene or the activity of the product of such gene to an extent sufficient to achieve a desired biological or physiological effect. Inhibition may be complete or partial.

[0102] As used herein, the terms “polynucleotide” and “nucleic acid” may be used interchangeably and refer to nucleotide sequences comprising deoxyribonucleic acid (DNA), and ribonucleic acid (RNA). The terms should also be understood to include, as equivalents, analogs of either RNA or DNA made from nucleotide analogs. Throughout this application mRNA sequences are set forth as representing the corresponding genes.

[0103] “Oligonucleotide” or “oligomer” refers to a deoxyribonucleotide or ribonucleotide sequence from about 2 to about 50 nucleotides. Each DNA or RNA nucleotide may be independently natural or synthetic, and or modified or unmodified. Modifications include changes to the sugar moiety, the base moiety and or the linkages between nucleotides in the oligonucleotide. The compounds of the present invention encompass molecules comprising deoxyribonucleotides, ribonucleotides, modified deoxyribonucleotides, modified ribonucleotides and combinations thereof. See below for in depth description of oligonucleotides.

[0104] RTP801L mRNA sequence, refers to the mRNA sequence shown in FIG. 1 (SEQ ID NO:1), or any homologous sequence thereof preferably having at least 70% identity, more preferable 80% identity, even more preferably 90% or 95% identity. This encompasses any sequences derived from SEQ ID NO:1 which have undergone mutations, alterations or modifications as described herein. Thus, in a preferred embodiment RTP801L is encoded by a nucleic acid sequence according to SEQ. ID. NO. 1. It is also within the present invention that the nucleic acids according to the present invention are only complementary and identical, respectively, to a part of the nucleic acid coding for RTP801L as, preferably, the first stretch and first strand is typically shorter than the nucleic acid according to the present invention. It is also to be acknowledged that based on the amino acid sequence of RTP801L any nucleic acid sequence coding for such amino acid sequence can be perceived by the one skilled in the art based on the genetic code. However, due to the assumed mode of action of the nucleic acids according to the present invention, it is most preferred that the nucleic acid coding for RTP801L, preferably the mRNA thereof, is the one present in the organism, tissue and/or cell, respectively, where the expression of RTP801L is to be reduced.

[0105] “RTP801L polypeptide” refers to the polypeptide of the RTP801L gene, and is understood to include, for the purposes of the instant invention, the terms “RTP777”, “DDIT4L” “REDD2”, and “SMHS1”, derived from any organism, optionally man, splice variants and fragments thereof retaining biological activity, and homologs thereof, preferably having at least 70%, more preferably at least 80%, even more preferably at least 90% or 95% homology thereto. In addition, this term is understood to encompass polypeptides resulting from minor alterations in the RTP801L coding sequence, such as, inter alia, point mutations, substitutions, deletions and insertions which may cause a difference in a few amino acids between the resultant polypeptide and the naturally occurring RTP801L. Polypeptides encoded by nucleic acid sequences which bind to the RTP801L coding sequence or genomic sequence under conditions of highly stringent hybridization, which are well-known in the art (for example Ausubel et al., Current Protocols in Molecular Biology, John Wiley and Sons, Baltimore, Md. (1988), updated in 1995 and 1998), are also encompassed by this term. Chemically modified RTP801L or chemically modified fragments of RTP801L are also included in the term, so long as the biological activity is retained. RTP801L preferably has or comprises an amino acid sequence according to SEQ. ID. NO. 2. It is acknowledged that there might be differences in the amino acid sequence among various tissues of an organism and among different organisms of one species or among different species to which the nucleic acid according to the present invention can be applied in various embodiments of the present invention. However, based on the technical teaching provided herein, the respective sequence can be taken into consideration accordingly when designing any of the nucleic acids according to the present invention.

[0106] Without being bound by theory, RTP801L may be a factor acting in the fine-tuning of cell response to energy disbalance. As such, it is a target suitable for treatment of any disease where cells should be rescued from apoptosis due to stressful conditions (e.g. diseases accompanied by death of normal cells) or where cells, which are adapted to stressful conditions due to changes in RTP801L expression (e.g. cancer cells), should be killed. In the latter case, RTP801L may be viewed as a survival factor for cancer cells and its inhibitors may treat cancer as a monotherapy or as sensitising drugs in combination with chemotherapy or radiotherapy. The assignee of the present invention has previously discovered gene RTP801 (see above) and molecules effective in inhibiting gene RTP801 (see co-assigned PCT publication No. WO06/023544A2 and PCT Application No. PCT/US2007/01468, hereby incorporated by reference in their entirety). Although RTP801L shares sequence and functional homology with RTP801, the assignee of the present invention has discovered that inhibition of RTP801 does not cause simultaneous inhibition of RTP801L, and vice versa. Therefore, RTP801L is an excellent target for inhibition in the conditions disclosed herein, and its inhibition is gene-specific. Tandem therapies which inhibit both RTP801 and RTP801L can have additional advantages and are discussed herein blow.

[0107] The term “amino acid” refers to a molecule which consists of any one of the 20 naturally occurring amino acids, amino acids which have been chemically modified (see below), or synthetic amino acids.

[0108] The term “polypeptide” refers to a molecule composed of two or more amino acids residues. The term includes peptides, polypeptides, proteins and peptidomimetics.

[0109] By “biological effect of RTP801L” or “RTP801L biological activity” is meant, without being bound by theory, the effect of RTP801L on apoptosis, such as apoptosis of alveolar cells in respiratory disorders; apoptosis of inner ear hair cells in hearing disorders, apoptosis of macular cells in macular degeneration, apoptosis of cells related to ischemia in any diseases or conditions, inter alia. The effect of RTP801L on apoptosis may be direct or indirect, and includes, without being bound by theory, any effect of RTP801L of induced by hypoxic or hyperoxic conditions. The indirect effect includes, but is not limited to, RTP801L binding to or having an effect on one of several molecules, which are involved in a signal transduction cascade resulting in apoptosis.

[0110] “Apoptosis” refers to a physiological type of cell death which results from activation of some cellular mechanisms, i.e. death that is controlled by the machinery of the cell. Apoptosis may, for example, be the result of activation of the cell machinery by an external trigger, e.g. a cytokine or anti-FAS antibody, which leads to cell death or by an internal signal. The term “programmed cell death” may also be used interchangeably with “apoptosis”.

[0111] “Apoptosis-related disease” refers to a disease whose etiology is related either wholly or partially to the process of apoptosis. The disease may be caused either by a malfunction of the apoptotic process (such as in cancer or an autoimmune disease) or by overactivity of the apoptotic process (such as in certain neurodegenerative diseases). Many diseases in which RTP801L is involved are apoptosis-related diseases. For example, apoptosis is a significant mechanism in dry AMD, whereby slow atrophy of photoreceptor and pigment epithelium cells, primarily in the central (macular) region of retina takes place. Neuroretinal apoptosis is also a significant mechanism in diabetic retinopathy.

[0112] An “RTP801L inhibitor” is a compound which is capable of inhibiting the activity of the RTP801L gene or RTP801L gene product, particularly the human RTP801L gene or gene product. Such inhibitors include substances that affect the transcription or translation of the gene as well as substances that affect the activity of the gene product. An RTP801L inhibitor may also be an inhibitor of the RTP801L promoter. Examples of such inhibitors may include, inter alia: polynucleotides such as antisense (AS) fragments, siRNA, or vectors comprising them; catalytic RNAs such as ribozymes. Specific siRNA RTP801L inhibitors are provided herein.

[0113] “Expression vector” refers to a vector that has the ability to incorporate and express heterologous DNA fragments in a foreign cell. Many prokaryotic and eukaryotic expression vectors are known and/or commercially available. Selection of appropriate expression vectors is within the knowledge of those having skill in the art.

[0114] The present invention also relates to functional nucleic acids comprising a double-stranded structure, their use for the manufacture of a medicament, a pharmaceutical composition comprising such functional nucleic acids and a method for the treatment of a patient.

[0115] Hypoxia has been recognised as a key element in the pathomechanism of quite a number of diseases such as stroke, emphysema and infarct which are associated with sub-optimum oxygen availability and tissue damaging responses to the hypoxia conditions. In fast-growing tissues, including tumor, a sub-optimum oxygen availability is compensated by undesired neo-angiogenesis. Therefore, at least in case of cancer diseases, the growth of vasculature is undesired.

[0116] In view of this, the inhibition of angiogenesis and vascular growth, respectively, is subject to intense research. Already today some compounds are available which inhibit undesired angiogenesis and vascular growth. Some of the more prominent compounds are those inhibiting VEGF and the VEGF receptor. In both cases, the effect of VEGF is avoided by either blocking VEGF as such, for example by using an antibody directed against VEGF such as pursued by Genentech's AVASTIN™ (monoclonal AB specific for VEGF) (Ferrara N.; Endocr Rev. 2004 25(4):581-611), or by blocking the corresponding receptor, i.e. the VEGF receptor (Traxler P; Cancer Res. 2004 64(14):4931-41; or Stadler W M et al., Clin Cancer Res. 2004; 10(10):3365-70).

[0117] As, however, angiogenesis and the growth of vasculature is a very basic and vital process in any animal and human being, the effect of this kind of compound has to be focused at the particular site where angiogenesis and vascular growth is actually undesired which renders appropriate targeting or delivery a critical issue in connection with this kind of therapeutic approach.

[0118] It is thus an objective of the present invention to provide further means for the treatment of diseases involving undesired growth of vasculature and angiogenesis, respectively.

[0119] By “small interfering RNA” (siRNA) is meant an RNA molecule which decreases or silences (prevents) the expression of a gene/mRNA of its endogenous cellular counterpart. The term is understood to encompass “RNA interference” (RNAi). RNA interference (RNAi) refers to the process of sequence-specific post transcriptional gene silencing in mammals mediated by small interfering RNAs (siRNAs) (Fire et al, 1998, Nature 391, 806). The corresponding process in plants is commonly referred to as specific post transcriptional gene silencing or RNA silencing and is also referred to as quelling in fungi. The RNA interference response may feature an endonuclease complex containing an siRNA, commonly referred to as an RNA-induced silencing complex (RISC), which mediates cleavage of single-stranded RNA having sequence complementary to the antisense strand of the siRNA duplex. Cleavage of the target RNA may take place in the middle of the region complementary to the antisense strand of the siRNA duplex (Elbashir et al 2001, Genes Dev., 15, 188). For recent information on these terms and proposed mechanisms, see Bernstein E., et al., 2001 November; 7(11): 1509-21; and Nishikura K.: Cell. 2001. 107(4):415-8. Examples of siRNA molecules which are used in the present invention are given in Tables A-G.

[0120] During recent years, RNAi has emerged as one of the most efficient methods for inactivation of genes (Nature Reviews, 2002, v. 3, p. 737-47; Nature, 2002, v. 418, p. 244-51). As a method, it is based on the ability of dsRNA species to enter a specific protein complex, where it is then targeted to the complementary cellular RNA and specifically degrades it. In more detail, dsRNAs are digested into short (17-29 bp) inhibitory RNAs (siRNAs) by type III RNAses (DICER, Drosha, etc) (Nature, 2001, v. 409, p. 363-6; Nature, 2003, 425, p. 415-9). These fragments and complementary mRNA are recognized by the specific RISC protein complex. The whole process is culminated by endonuclease cleavage of target mRNA (Nature Reviews, 2002, v. 3, p. 737-47; Curr Opin Mol. Ther. 2003 5(3):217-24).

[0121] For delivery of siRNAs, see, for example, Shen et al FEBS letters 539: 111-114 (2003), Xia et al., Nat Biotech 20: 1006-1010 (2002), Reich et al., Molec. Vision 9: 210-216 (2003), Sorensen et al. J. Mol. Biol. 327: 761-766 (2003), Lewis et al., Nat Genet. 32: 107-108 (2002) and Simeoni et al., NAR 31, 11: 2717-2724 (2003). siRNA has been successfully used for inhibition in primates; for further details see Tolentino et al., 2004 Retina 24(1):132-138.

[0122] A number of PCT applications have recently been published that relate to the RNAi phenomenon. These include: PCT publication WO 00/44895; PCT publication WO 00/49035; PCT publication WO 00/63364; PCT publication WO 01/36641; PCT publication WO 01/36646; PCT publication WO 99/32619; PCT publication WO 00/44914; PCT publication WO 01/29058; and PCT publication WO 01/75164.

[0123] RNA interference (RNAi) is based on the ability of dsRNA species to enter a cytoplasmic protein complex, where it is then targeted to the complementary cellular RNA and specifically degrade it. The RNA interference response features an endonuclease complex containing an siRNA, commonly referred to as an RNA-induced silencing complex (RISC), which mediates cleavage of single-stranded RNA having a sequence complementary to the antisense strand of the siRNA duplex. Cleavage of the target RNA may take place in the middle of the region complementary to the antisense strand of the siRNA duplex (Elbashir et al., Genes Dev., 2001, 15(2):188-200). In more detail, longer dsRNAs are digested into short (17-29 bp) dsRNA fragments (also referred to as short inhibitory RNAs, “siRNAs”) by type III RNAses (DICER, DROSHA, etc.; Bernstein et al., Nature, 2001, 409(6818):363-6; Lee et al., Nature, 2003, 425(6956):415-9). The RISC protein complex recognizes these fragments and complementary mRNA. The whole process is culminated by endonuclease cleavage of target mRNA (McManus & Sharp, Nature Rev Genet, 2002, 3(10):737-47; Paddison & Hannon, Curr Opin Mol. Ther. 2003, 5(3):217-24). (For additional information on these terms and proposed mechanisms, see for example Bernstein et al., RNA 2001, 7(11):1509-21; Nishikura, Cell 2001, 107(4):415-8 and PCT publication WO 01/36646).

[0124] “Nucleotide” is meant to encompass deoxyribonucleotides and ribonucleotides, which may be natural or synthetic, and or modified or unmodified. Modifications include changes and substitutions to the sugar moiety, the base moiety and/or the internucleotide linkages.

[0125] All analogs of, or modifications to, a nucleotide/oligonucleotide may be employed with the present invention, provided that said analog or modification does not substantially adversely affect the function of the nucleotide/oligonucleotide. Acceptable modifications include modifications of the sugar moiety, modifications of the base moiety, modifications in the internucleotide linkages and combinations thereof.

[0126] The nucleotides can be selected from naturally occurring or synthetic modified bases. Naturally occurring bases include adenine, guanine, cytosine, thymine and uracil. Modified bases of nucleotides include inosine, xanthine, hypoxanthine, 2-aminoadenine, 6-methyl, 2-propyl and other alkyl adenines, 5-halo uracil, 5-halo cytosine, 6-aza cytosine and 6-aza thymine, pseudo uracil, 4-thiuracil, 8-halo adenine, 8-aminoadenine, 8-thiol adenine, 8-thiolalkyl adenines, 8-hydroxyl adenine and other 8-substituted adenines, 8-halo guanines, 8-amino guanine, 8-thiol guanine, 8-thioalkyl guanines, 8-hydroxyl guanine and other substituted guanines, other aza and deaza adenines, other aza and deaza guanines, 5-trifluoromethyl uracil and 5-trifluoro cytosine. Abasic nucleotides are encompassed by the present invention, as well as molecules comprising alternating RNA and DNA nucleotides.

[0127] In addition, analogs of polynucleotides can be prepared wherein the structure of one or more nucleotide is fundamentally altered and better suited as therapeutic or experimental reagents. An example of a nucleotide analog is a peptide nucleic acid (PNA) wherein the deoxyribose (or ribose) phosphate backbone in DNA (or RNA is replaced with a polyamide backbone which is similar to that found in peptides. PNA analogs have been shown to be resistant to enzymatic degradation and to have extended lives in vivo and in vitro. Mirror nucleotides (“L-nucleotides”) may also be employed.

[0128] Possible modifications to the sugar residue are manifold and include 2′-O alkyl, locked nucleic acid (LNA), glycol nucleic acid (GNA), threose nucleic acid (TNA), arabinoside, altritol (ANA) and other 6-membered sugars including morpholinos, and cyclohexinyls.

[0129] Examples of siRNA compounds comprising LNA nucleotides are disclosed in Elmen et al., (NAR 2005. 33(1):439-447).

[0130] The compounds of the present invention can be synthesized using one or more inverted nucleotides, for example inverted thymidine or inverted adenine (for example see Takei, et al., 2002. JBC 277(26):23800-06.)

[0131] Certain structures include siRNA compounds having one or a plurality of 2′-5′ internucleotide linkages (bridges or backbone).

[0132] In the context of the present invention, a “mirror” nucleotide also referred to as a Spiegelmer, is a nucleotide with reverse chirality to the naturally occurring or commonly employed nucleotide, i.e., a mirror image of the naturally occurring or commonly employed nucleotide. The mirror nucleotide can be a ribonucleotide (L-RNA) or a deoxyribonucleotide (L-DNA) and may further comprise at least one sugar, base and or backbone modification. U.S. Pat. No. 6,602,858 discloses nucleic acid catalysts comprising at least one L-nucleotide substitution.

[0133] Backbone modifications, such as ethyl (resulting in a phospho-ethyl triester); propyl (resulting in a phospho-propyl triester); and butyl (resulting in a phospho-butyl triester) are also possible. Other backbone modifications include polymer backbones, cyclic backbones, acyclic backbones, thiophosphate-D-ribose backbones, amidates, phosphonoacetates.

[0134] Other possible backbone modifications include thioate modifications or 2′-5′ bridged backbone modifications.

[0135] Additional modifications which may be present in the molecules of the present invention include nucleoside modifications such as artificial nucleic acids, peptide nucleic acid (PNA), morpholino and locked nucleic acid (LNA), glycol nucleic acid (GNA), threose nucleic acid (TNA), arabinoside, and mirror nucleoside (for example, beta-L-deoxynucleoside instead of beta-D-deoxynucleoside Further, said molecules may additionally contain modifications on the sugar, such as 2′ alkyl, 2′ fluoro, 2′O allyl 2′ amine and 2′ alkoxy. Many additional sugar modifications are discussed herein.

[0136] Further, the inhibitory nucleic acid molecules of the present invention may comprise one or more gaps and/or one or more nicks and/or one or more mismatches. Without wishing to be bound by theory, gaps, nicks and mismatches have the advantage of partially destabilizing the nucleic acid/siRNA, so that it may be more easily processed by endogenous cellular machinery such as DICER, DROSHA or RISC into its inhibitory components.

[0137] In the context of the present invention, a gap in a nucleic acid refers to the absence of one or more internal nucleotides in one strand, while a nick in a nucleic acid refers to the absence of a internucleotide linkage between two adjacent nucleotides in one strand. Any of the molecules of the present invention may contain one or more gaps and/or one or more nicks.

[0138] Further provided by the present invention is an siRNA encoded by any of the molecules disclosed herein, a vector encoding any of the molecules disclosed herein, and a pharmaceutical composition comprising any of the molecules disclosed herein or the vectors encoding them; and a pharmaceutically acceptable carrier.

### Oligonucleotides

[0139] The siRNA compounds useful in the present invention include unmodified and chemically and/or structurally modified compounds.

[0140] The selection and synthesis of siRNA corresponding to known genes has been widely reported; see for example Ui-Tei et al., J Biomed Biotechnol. 2006; 65052; Chalk et al., BBRC. 2004, 319(1):264-74; Sioud & Leirdal, Met. Mol. Biol. 2004, 252:457-69; Levenkova et al., Bioinform. 2004, 20(3):430-2; Ui-Tei et al., NAR. 2004, 32(3):936-48. For examples of the use and production of modified siRNA see for example Braasch et al., Biochem. 2003, 42(26):7967-75; Chiu et al., RNA. 2003, 9(9):1034-48; PCT Publication Nos. WO 2004/015107 and WO 02/44321 and U.S. Pat. Nos. 5,898,031 and 6,107,094.

[0141] Tables A-G comprise nucleic acid sequences of sense and corresponding antisense oligonucleotides useful in preparing corresponding siRNA compounds.

[0142] The present invention provides double-stranded oligonucleotides (e.g. siRNAs), which down-regulate the expression of RTP801L. A siRNA of the invention is a duplex oligoribonucleotide in which the sense strand is derived from the mRNA sequence of RTP801L, and the antisense strand is complementary to the sense strand. In general, some deviation from the target mRNA sequence is tolerated without compromising the siRNA activity (see e.g. Czauderna et al., 2003, NAR 31(11), 2705-2716). An siRNA of the invention inhibits RTP801L gene expression on a post-transcriptional level with or without destroying the mRNA. Without being bound by theory, siRNA may target the mRNA for specific cleavage and degradation and/or may inhibit translation from the targeted message.

[0143] In some embodiments the oligonucleotide according to the present invention comprises modified siRNA, having one or more of any of the modifications disclosed herein. In various embodiments the siRNA comprises an RNA duplex comprising a first strand and a second strand, whereby the first strand comprises a ribonucleotide sequence at least partially complementary to about 18 to about 40 consecutive nucleotides of a target nucleic acid which is mRNA transcribed from RTP801L, and the second strand comprises a ribonucleotide sequence at least partially complementary to the first strand and wherein said first strand or said second strand comprises a plurality of groups of modified ribonucleotides, optionally having a modification at the 2′-position of the sugar moiety whereby within each strand each group of modified ribonucleotides is flanked on one or both sides by a group of flanking nucleotides, optionally ribonucleotides, whereby each ribonucleotide forming the group of flanking ribonucleotides is selected from an unmodified ribonucleotide or a ribonucleotide having a modification different from the modification of the groups of modified ribonucleotides.

[0144] The group of modified ribonucleotides and/or the group of flanking nucleotides may comprise a number of ribonucleotides selected from the group consisting of an integer from 1 to 12. Accordingly, the group thus comprises one nucleotide, two nucleotides, three nucleotides, four nucleotides, five nucleotides, six nucleotides, seven nucleotides, eight nucleotides, nine nucleotides, ten nucleotides, eleven nucleotides or twelve nucleotides.

[0145] The groups of modified nucleotides and flanking nucleotides may be organized in a pattern on only one of the strands. In some embodiments the sense or the antisense strand comprises a pattern of modified nucleotides. In some preferred embodiments the middle ribonucleotide in the antisense strand is an unmodified nucleotide. For example, in a 19-oligomer antisense strand, ribonucleotide number 10 is unmodified; in a 21-oligomer antisense strand, ribonucleotide number 11 is unmodified; and in a 23-oligomer antisense strand, ribonucleotide number 12 is unmodified. The modifications or pattern of modification, if any, of the siRNA must be planned to allow for this. In an even numbered oligomer e.g. a 22 mer, the middle nucleotide may be number 11 or 12.

[0146] Possible modifications on the 2′ moiety of the sugar residue include amino, fluoro, methoxy alkoxy, alkyl, amino, fluoro, chloro, bromo, CN, CF, imidazole, carboxylate, thioate, C₁ to C₁₀ lower alkyl, substituted lower alkyl, alkaryl or aralkyl, OCF₃, OCN, O-, S-, or N-alkyl; O-, S, or N-alkenyl; SOCH₃; SO₂CH₃; ONO₂; NO₂, N₃; heterozycloalkyl; heterozycloalkaryl; aminoalkylamino; polyalkylamino or substituted silyl, as, among others, described in European patents EP 0 586 520 B1 or EP 0 618 925 B1. One or more deoxyribonucleotides are also tolerated in the compounds of the present invention. As used herein, in the description of any strategy for the design of molecules, RNAi or any embodiment of RNAi disclosed herein, the term “end modification” means a chemical entity added to the terminal 5′ or 3′ nucleotide of the sense and/or antisense strand. Examples for such end modifications include, but are not limited to, 3′ or 5′ phosphate, inverted abasic, abasic, amino, fluoro, chloro, bromo, CN, CF₃, methoxy, imidazolyl, carboxylate, phosphorothioate, C₁ to C₂₂ and lower alkyl, lipids, sugars and polyaminoacids (i.e. peptides), substituted lower alkyl, alkaryl or aralkyl, OCF₃, OCN, O-, S-, or N-alkyl; O-, S-, or N-alkenyl; SOCH₃; SO₂CH₃; ONO₂; NO₂, N₃; heterocycloalkyl; heterocycloalkaryl; aminoalkylamino; polyalkylamino or substituted silyl, as, among others, described in European patents EP 0 586 520 B1 or EP 0 618 925 B1.

[0147] In some embodiments the siRNA is blunt ended, i.e. Z and Z′ are absent, on one or both ends. More specifically, the siRNA may be blunt ended on the end defined by the 5′-terminus of the first strand and the 3′-terminus of the second strand, and/or the end defined by the 3′-terminus of the first strand and the 5′-terminus of the second strand.

[0148] In other embodiments at least one of the two strands may have an overhang of at least one nucleotide at the 5′-terminus; the overhang may consist of at least one deoxyribonucleotide. At least one of the strands may also optionally have an overhang of at least one nucleotide at the 3′-terminus. The overhang may consist of from about 1 to about 5 nucleotides.

[0149] The length of RNA duplex is from about 18 to about 40 ribonucleotides, preferably 19, 21 or 23 ribonucleotides. Further, the length of each strand may independently have a length selected from the group consisting of about 15 to about 40 bases, preferably 18 to 23 bases and more preferably 19, 21 or 23 ribonucleotides.

[0150] In certain embodiments the complementarity between said first strand and the target nucleic acid is perfect. In some embodiments, the strands are substantially complementary, i.e. having one, two or up to three mismatches between said first strand and the target nucleic acid. Substantially complementary refers to complementarity of greater than about 84%, to another sequence. For example in a duplex region consisting of 19 base pairs one mismatch results in 94.7% complementarity, two mismatches results in about 89.5% complementarity and 3 mismatches results in about 84.2% complementarity, rendering the duplex region substantially complementary. Accordingly substantially identical refers to identity of greater than about 84%, to another sequence.

[0151] In some embodiments the first strand and the second strand are linked by a loop structure, which is comprised of a non-nucleic acid polymer such as, inter alia, polyethylene glycol. Alternatively, the loop structure is comprised of a nucleic acid, including modified and non-modified ribonucleotides and modified and non-modified deoxyribonucleotides.

[0152] Further, the 5′-terminus of the first strand of the siRNA may be linked to the 3′-terminus of the second strand, or the 3′-terminus of the first strand are linked to the 5′-terminus of the second strand, said linkage being via a nucleic acid linker typically having a length between 2-100 nucleobases, preferably about 2 to about 30 nucleobases.

[0153] In preferred embodiments of the compounds of the invention having alternating ribonucleotides modified in at least one of the antisense and the sense strands of the compound, for 19 mer and 23 mer oligomers the ribonucleotides at the 5′ and 3′ termini of the antisense strand are modified in their sugar residues, and the ribonucleotides at the 5′ and 3′ termini of the sense strand are unmodified in their sugar residues. For 21 mer oligomers the ribonucleotides at the 5′ and 3′ termini of the sense strand are modified in their sugar residues, and the ribonucleotides at the 5′ and 3′ termini of the antisense strand are unmodified in their sugar residues, or may have an optional additional modification at the 3′ terminus. As mentioned above, it is preferred that the middle nucleotide of the antisense strand is unmodified.

[0154] Additionally, the invention provides siRNA comprising a double stranded nucleic acid molecule wherein 1, 2, or 3 of the nucleotides in one strand or both strands are substituted thereby providing at least one base pair mismatch. The substituted nucleotides in each strand are preferably in the terminal region of one strand or both strands.

[0155] According to one preferred embodiment of the invention, the antisense and the sense strands of the oligonucleotide/siRNA are phosphorylated only at the 3′-terminus and not at the 5′-terminus. According to another preferred embodiment of the invention, the antisense and the sense strands are non-phosphorylated. According to yet another preferred embodiment of the invention, the 5′ most ribonucleotide in the sense strand is modified to abolish any possibility of in vivo 5′-phosphorylation.

[0156] Any siRNA sequence disclosed herein can be prepared having any of the modifications/structures disclosed herein. The combination of sequence plus structure is novel and can be used in the treatment of the conditions disclosed herein.

[0157] Other modifications have been disclosed. The inclusion of a 5′-phosphate moiety was shown to enhance activity of siRNAs in Drosophila embryos (Boutla, et al., Curr. Biol. 2001, 11:1776-1780) and is required for siRNA function in human HeLa cells (Schwarz et al., Mol. Cell, 2002, 10:537-48). Amarzguioui et al., (NAR, 2003, 31(2):589-95) showed that siRNA activity depended on the positioning of the 2′-O-methyl modifications. Holen et al (NAR. 2003, 31(9):2401-07) report that an siRNA having small numbers of 2′-O-methyl modified nucleosides gave good activity compared to wild type but that the activity decreased as the numbers of 2′-O-methyl modified nucleosides was increased. Chiu and Rana (RNA. 2003, 9:1034-48) teach that incorporation of 2′-O-methyl modified nucleosides in the sense or antisense strand (fully modified strands) severely reduced siRNA activity relative to unmodified siRNA. The placement of a 2′-O-methyl group at the 5′-terminus on the antisense strand was reported to severely limit activity whereas placement at the 3′-terminus of the antisense and at both termini of the sense strand was tolerated (Czauderna et al., NAR. 2003, 31(11):2705-16). The molecules of the present invention offer an advantage in that they are active and or stable, are non-toxic and may be formulated as pharmaceutical compositions for treatment of various diseases.

[0158] In addition, analogues of polynucleotides can be prepared wherein the structure of one or more nucleotide is fundamentally altered and better suited as therapeutic or experimental reagents.

[0159] Possible modifications to the sugar residue are manifold and include 2′-O alkyl, locked nucleic acid (LNA), glycol nucleic acid (GNA), threose nucleic acid (TNA), arabinoside, altritol (ANA) and other, 6-membered sugars including morpholinos, and cyclohexinyls.

[0160] LNA compounds are disclosed in International Patent Publication Nos. WO 00/47599, WO 99/14226, and WO 98/39352. Examples of siRNA compounds comprising LNA nucleotides are disclosed in Elmen et al., (NAR 2005. 33(1):439-447) and in PCT Patent Publication No. WO 2004/083430.

[0161] The compounds of the present invention can be synthesized using one or more inverted nucleotides, for example inverted thymidine or inverted adenine (for example see Takei, et al., 2002. JBC 277(26):23800-06.

[0162] Backbone modifications, such as ethyl (resulting in a phospho-ethyl triester); propyl (resulting in a phospho-propyl triester); and butyl (resulting in a phospho-butyl triester) are also possible. Other backbone modifications include polymer backbones, cyclic backbones, acyclic backbones, thiophosphate-D-ribose backbones, amidates, phosphonoacetate derivatives. Certain structures include siRNA compounds having one or a plurality of 2′-5′ internucleotide linkages (bridges or backbone).

[0163] The term “unconventional moiety” as used herein refers to abasic ribose moiety, an abasic deoxyribose moiety, a deoxyribonucleotide, a modified deoxyribonucleotide, a mirror nucleotide, a non-base pairing nucleotide analog and a nucleotide joined to an adjacent nucleotide by a 2′-5′ internucleotide phosphate bond; bridged nucleic acids including LNA and ethylene bridged nucleic acids.

[0164] The term “capping moiety” as used herein includes abasic ribose moiety, abasic deoxyribose moiety, modifications abasic ribose and abasic deoxyribose moieties including 2′ O alkyl modifications; inverted abasic ribose and abasic deoxyribose moieties and modifications thereof; C6-imino-Pi; a mirror nucleotide including L-DNA and L-RNA; 5′OMe nucleotide; and nucleotide analogs including 4′,5′-methylene nucleotide; 1-(β-D-erythrofuranosyl)nucleotide; 4′-thio nucleotide, carbocyclic nucleotide; 5′-amino-alkyl phosphate; 1,3-diamino-2-propyl phosphate, 3-aminopropyl phosphate; 6-aminohexyl phosphate; 12-aminododecyl phosphate; hydroxypropyl phosphate; 1,5-anhydrohexitol nucleotide; alpha-nucleotide; threo-pentofuranosyl nucleotide; acyclic 3′,4′-seco nucleotide; 3,4-dihydroxybutyl nucleotide; 3,5-dihydroxypentyl nucleotide, 5′-5′-inverted abasic moiety; 1,4-butanediol phosphate; 5′-amino; and bridging or non bridging methylphosphonate and 5′-mercapto moieties.

[0165] Abasic deoxyribose moiety includes for example abasic deoxyribose-3′-phosphate; 1,2-dideoxy-D-ribofuranose-3-phosphate; 1,4-anhydro-2-deoxy-D-ribitol-3-phosphate. Inverted abasic deoxyribose moiety includes inverted deoxyriboabasic; 3′,5′ inverted deoxyriboabasic 5′-phosphate.

[0166] Mirror nucleotide includes for example L-DNA (L-deoxyriboadenosine-3′-phosphate (mirror dA); L-deoxyribocytidine-3′-phosphate (mirror dC); L-deoxyriboguanosine-3′-phosphate (mirror dG); L-deoxyribothymidine-3′-phosphate (mirror image dT)) and L-RNA (L-riboadenosine-3′-phosphate (mirror rA); L-ribocytidine-3′-phosphate (mirror rC); L-riboguanosine-3′-phosphate (mirror rG); L-ribouracil-3′-phosphate (mirror dU).

[0167] Further, the inhibitory nucleic acid molecules of the present invention may comprise one or more gaps and/or one or more nicks and/or one or more mismatches. Without wishing to be bound by theory, gaps, nicks and mismatches have the advantage of partially destabilizing the nucleic acid/siRNA, so that it may be more easily processed by endogenous cellular machinery such as DICER, DROSHA or RISC into its inhibitory components.

[0168] The molecules of the present invention may comprise siRNAs, synthetic siRNAs, shRNAs and synthetic shRNAs, in addition to other nucleic acid sequences or molecules which encode such molecules or other inhibitory nucleotide molecules.

[0169] The compounds of the present invention may further comprise an end modification. A biotin group may be attached to either the most 5′ or the most 3′ nucleotide of the first and/or second strand or to both ends. In a more preferred embodiment the biotin group is coupled to a polypeptide or a protein. It is also within the scope of the present invention that the polypeptide or protein is attached through any of the other aforementioned modifications.

[0170] The various end modifications as disclosed herein are preferably located at the ribose moiety of a nucleotide of the nucleic acid according to the present invention. More particularly, the end modification may be attached to or replace any of the OH-groups of the ribose moiety, including but not limited to the 2′OH, 3′OH and 5′OH position, provided that the nucleotide thus modified is a terminal nucleotide. Inverted abasic or abasic are nucleotides, either deoxyribonucleotides or ribonucleotides which do not have a nucleobase moiety. This kind of compound is, inter alia, described in Sternberger, et al., (Antisense Nucleic Acid Drug Dev, 2002.12, 131-43).

[0171] In the context of the present invention, a gap in a nucleic acid refers to the absence of one or more internal nucleotides in one strand, while a nick in a nucleic acid refers to the absence of an internucleotide linkage between two adjacent nucleotides in one strand. Any of the molecules of the present invention may contain one or more gaps and/or one or more nicks. Further provided by the present invention is an siRNA encoded by any of the molecules disclosed herein, a vector encoding any of the molecules disclosed herein, and a pharmaceutical composition comprising any of the molecules disclosed herein or the vectors encoding them; and a pharmaceutically acceptable carrier.

[0172] Particular molecules to be administered according to the methods of the present invention are disclosed below under the heading “structural motifs”. For the sake of clarity, any of these molecules can be administered according to any of the methods of the present invention.

### Structural Motifs

[0173] According to the present invention the siRNA compounds are chemically and or structurally modified according to one of the following modifications set forth in Structures (A)-(P) or as tandem siRNA or RNAstar.

[0174] In one aspect the present invention provides a compound set forth as Structure (A):

| | | |
|---|---|---|
| (A) | 5′ (N)ₓ-Z 3′ | (antisense strand) |
| | 3′ Z′-(N′)_{y} 5′ | (sense strand) |

wherein each of N and N′ is a nucleotide selected from an unmodified ribonucleotide, a modified ribonucleotide, an unmodified deoxyribonucleotide and a modified deoxyribonucleotide;
wherein each of (N)x and (N′)y is an oligonucleotide in which each consecutive N or N′ is joined to the next N or N′ by a covalent bond;
wherein each of x and y is an integer between 18 and 40;
wherein each of Z and Z′ may be present or absent, but if present is 1-5 consecutive nucleotides covalently attached at the 3′ terminus of the strand in which it is present; and
and wherein the sequence of (N)x comprises an antisense sequence substantially complementary to about 18 to about 40 consecutive ribonucleotides in an mRNA transcribed from the RTP801L gene.

[0175] In certain embodiments the present invention provides a compound having structure B (structures having alternating 2′-O-methyl modification in both strands):

| | | |
|---|---|---|
| (B) | 5′ (N)x 3′ | antisense strand |
| | 3′ (N′)y 5′ | sense strand |

wherein each of (N)ₓ and (N′)_{y} is an oligomer in which each consecutive N or N′ is an unmodified ribonucleotide or a modified ribonucleotide joined to the next N or N′ by a covalent bond;
wherein each of x and y=19, 21 or 23 and (N)ₓ and (N′)^{y} are fully complementary;
wherein alternating ribonucleotides in each of (N)ₓ and (N′)_{y} are modified to result in a 2′-O-methyl modification in the sugar residue of the ribonucleotides;
wherein the sequence of (N′)_{y} is a sequence complementary to (N)x; and wherein the sequence of (N)ₓ comprises an antisense sequence substantially complementary to about 18 to about 40 consecutive ribonucleotides in an mRNA transcribed from the RTP801L gene.

[0176] In some embodiments each of (N)ₓ and (N′)_{y} is independently phosphorylated or non-phosphorylated at the 3′ and 5′ termini.

[0177] In certain embodiments of the invention, alternating ribonucleotides are modified in both the antisense and the sense strands of the compound.

[0178] In certain embodiments wherein each of x and y=19 or 23, each N at the 5′ and 3′ termini of (N)ₓ is modified; and

each N′ at the 5′ and 3′ termini of (N′)_{y} is unmodified.

[0179] In certain embodiments wherein each of x and y=21, each N at the 5′ and 3′ termini of (N)ₓ is unmodified; and

each N′ at the 5′ and 3′ termini of (N′)_{y} is modified.

[0180] In particular embodiments, when x and y=19, the siRNA is modified such that a 2′-O-methyl (2′-OMe) group is present on the first, third, fifth, seventh, ninth, eleventh, thirteenth, fifteenth, seventeenth and nineteenth nucleotide of the antisense strand (N)ₓ, and whereby the very same modification, i.e. a 2′-OMe group, is present at the second, fourth, sixth, eighth, tenth, twelfth, fourteenth, sixteenth and eighteenth nucleotide of the sense strand (N′)_{y}. In various embodiments these particular siRNA compounds are blunt ended at both termini.

[0181] In some embodiments, the present invention provides a compound having Structure (C):

| | | |
|---|---|---|
| (C) | 5′ (N)x-Z 3′ | antisense strand |
| | 3′ Z′-(N′)y 5′ | sense strand |

wherein each of N and N′ is a nucleotide independently selected from an unmodified ribonucleotide, a modified ribonucleotide, an unmodified deoxyribonucleotide and a modified deoxyribonucleotide;
wherein each of (N)x and (N′)y is an oligomer in which each consecutive nucleotide is joined to the next nucleotide by a covalent bond and each of x and y is an integer between 18 and 40;
wherein in (N)x the nucleotides are unmodified or (N)x comprises alternating modified ribonucleotides and unmodified ribonucleotides; each modified ribonucleotide being modified so as to have a 2′-O-methyl on its sugar and the ribonucleotide located at the middle position of (N)x being modified or unmodified preferably unmodified;
wherein (N′)y comprises unmodified ribonucleotides further comprising one modified nucleotide at a terminal or penultimate position, wherein the modified nucleotide is selected from the group consisting of a mirror nucleotide, a bicyclic nucleotide, a 2′-sugar modified nucleotide, an altritol nucleotide, or a nucleotide joined to an adjacent nucleotide by an internucleotide linkage selected from a 2′-5′ phosphodiester bond, a P-alkoxy linkage or a PACE linkage;
wherein if more than one nucleotide is modified in (N′)y, the modified nucleotides may be consecutive;
wherein each of Z and Z′ may be present or absent, but if present is 1-5 deoxyribonucleotides covalently attached at the 3′ terminus of any oligomer to which it is attached;
wherein the sequence of (N′)_{y} comprises a sequence substantially complementary to (N)x; and wherein the sequence of (N)ₓ comprises an antisense sequence substantially complementary to about 18 to about 40 consecutive ribonucleotides in an mRNA transcribed from the RTP801L gene.

[0182] In particular embodiments, x=y=19 and in (N)x each modified ribonucleotide is modified so as to have a 2′-O-methyl on its sugar and the ribonucleotide located at the middle of (N)x is unmodified. Accordingly, in a compound wherein x=19, (N)x comprises 2′-O-methyl sugar modified ribonucleotides at positions 1, 3, 5, 7, 9, 11, 13, 15, 17 and 19. In other embodiments, (N)x comprises 2′O Me modified ribonucleotides at positions 2, 4, 6, 8, 11, 13, 15, 17 and 19 and may further comprise at least one abasic or inverted abasic pseudo-nucleotide for example in position 5. In other embodiments, (N)x comprises 2′O Me modified ribonucleotides at positions 2, 4, 8, 11, 13, 15, 17 and 19 and may further comprise at least one abasic or inverted abasic pseudo-nucleotide for example in position 6. In other embodiments, (N)x comprises 2′O Me modified ribonucleotides at positions 2, 4, 6, 8, 11, 13, 17 and 19 and may further comprise at least one abasic or inverted abasic pseudo-nucleotide for example in position 15. In other embodiments, (N)x comprises 2′O Me modified ribonucleotides at positions 2, 4, 6, 8, 11, 13, 15, 17 and 19 and may further comprise at least one abasic or inverted abasic pseudo-nucleotide for example in position 14. In other embodiments, (N)x comprises 2′O Me modified ribonucleotides at positions 1, 2, 3, 7, 9, 11, 13, 15, 17 and 19 and may further comprise at least one abasic or inverted abasic pseudo-nucleotide for example in position 5. In other embodiments, (N)x comprises 2′O Me modified ribonucleotides at positions 1, 2, 3, 5, 7, 9, 11, 13, 15, 17 and 19 and may further comprise at least one abasic or inverted abasic pseudo-nucleotide for example in position 6. In other embodiments, (N)x comprises 2′O Me modified ribonucleotides at positions 1, 2, 3, 5, 7, 9, 11, 13, 17 and 19 and may further comprise at least one abasic or inverted abasic pseudo-nucleotide for example in position 15. In other embodiments, (N)x comprises 2′O Me modified ribonucleotides at positions 1, 2, 3, 5, 7, 9, 11, 13, 15, 17 and 19 and may further comprise at least one abasic or inverted abasic pseudo-nucleotide for example in position 14. In other embodiments, (N)x comprises 2′O Me modified ribonucleotides at positions 2, 4, 6, 7, 9, 11, 13, 15, 17 and 19 and may further comprise at least one abasic or inverted abasic pseudo-nucleotide for example in position 5. In other embodiments, (N)x comprises 2′O Me modified ribonucleotides at positions 1, 2, 4, 6, 7, 9, 11, 13, 15, 17 and 19 and may further comprise at least one abasic or inverted abasic pseudo-nucleotide for example in position 5. In other embodiments, (N)x comprises 2′O Me modified ribonucleotides at positions 2, 4, 6, 8, 11, 13, 14, 16, 17 and 19 and may further comprise at least one abasic or inverted abasic pseudo-nucleotide for example in position 15. In other embodiments, (N)x comprises 2′O Me modified ribonucleotides at positions 1, 2, 3, 5, 7, 9, 11, 13, 14, 16, 17 and 19 and may further comprise at least one abasic or inverted abasic pseudo-nucleotide for example in position 15. In other embodiments, (N)x comprises 2′O Me modified ribonucleotides at positions 2, 4, 6, 8, 11, 13, 15, 17 and 19 and may further comprise at least one abasic or inverted abasic pseudo-nucleotide for example in position 7. In other embodiments, (N)x comprises 2′O Me modified ribonucleotides at positions 2, 4, 6, 11, 13, 15, 17 and 19 and may further comprise at least one abasic or inverted abasic pseudo-nucleotide for example in position 8. In other embodiments, (N)x comprises 2′O Me modified ribonucleotides at positions 2, 4, 6, 8, 11, 13, 15, 17 and 19 and may further comprise at least one abasic or inverted abasic pseudo-nucleotide for example in position 9. In other embodiments, (N)x comprises 2′O Me modified ribonucleotides at positions 2, 4, 6, 8, 11, 13, 15, 17 and 19 and may further comprise at least one abasic or inverted abasic pseudo-nucleotide for example in position 10. In other embodiments, (N)x comprises 2′O Me modified ribonucleotides at positions 2, 4, 6, 8, 13, 15, 17 and 19 and may further comprise at least one abasic or inverted abasic pseudo-nucleotide for example in position 11. In other embodiments, (N)x comprises 2′O Me modified ribonucleotides at positions 2, 4, 6, 8, 11, 13, 15, 17 and 19 and may further comprise at least one abasic or inverted abasic pseudo-nucleotide for example in position 12. In other embodiments, (N)x comprises 2′O Me modified ribonucleotides at positions 2, 4, 6, 8, 11, 15, 17 and 19 and may further comprise at least one abasic or inverted abasic pseudo-nucleotide for example in position 13.

[0183] In yet other embodiments (N)x comprises at least one nucleotide mismatch relative to the RTP801L gene. In certain preferred embodiments, (N)x comprises a single nucleotide mismatch on position 5, 6, or 14. In one embodiment of Structure (C), at least two nucleotides at either or both the 5′ and 3′ termini of (N′)y are joined by a 2′-5′ phosphodiester bond. In certain preferred embodiments x=y=19 or x=y=23; in (N)x the nucleotides alternate between modified ribonucleotides and unmodified ribonucleotides, each modified ribonucleotide being modified so as to have a 2′-O-methyl on its sugar and the ribonucleotide located at the middle of (N)x being unmodified; and three nucleotides at the 3′ terminus of (N′)y are joined by two 2′-5′ phosphodiester bonds (set forth herein as Structure I). In other preferred embodiments, x=y=19 or x=y=23; in (N)x the nucleotides alternate between modified ribonucleotides and unmodified ribonucleotides, each modified ribonucleotide being modified so as to have a 2′-O-methyl on its sugar and the ribonucleotide located at the middle of (N)x being unmodified; and four consecutive nucleotides at the 5′ terminus of (N′)y are joined by three 2′-5′ phosphodiester bonds. In a further embodiment, an additional nucleotide located in the middle position of (N)_{y} may be modified with 2′-O-methyl on its sugar. In another preferred embodiment, in (N)x the nucleotides alternate between 2′-O-methyl modified ribonucleotides and unmodified ribonucleotides, and in (N′)y four consecutive nucleotides at the 5′ terminus are joined by three 2′-5′ phosphodiester bonds and the 5′ terminal nucleotide or two or three consecutive nucleotides at the 5′ terminus comprise 3′-O-methyl modifications.

[0184] In certain preferred embodiments of Structure C, x=y=19 and in (N′)y, at least one position comprises an abasic or inverted abasic pseudo-nucleotide, preferably five positions comprises an abasic or inverted abasic pseudo-nucleotides. In various embodiments, the following positions comprise an abasic or inverted abasic: positions 1 and 16-19, positions 15-19, positions 1-2 and 17-19, positions 1-3 and 18-19, positions 1-4 and 19 and positions 1-5. (N′)y may further comprise at least one LNA nucleotide.

[0185] In certain preferred embodiments of Structure C, x=y=19 and in (N′)y the nucleotide in at least one position comprises a mirror nucleotide, a deoxyribonucleotide and a nucleotide joined to an adjacent nucleotide by a 2′-5′ internucleotide bond.

[0186] In certain preferred embodiments of Structure C, x=y=19 and (N′)y comprises a mirror nucleotide. In various embodiments the mirror nucleotide is an L-DNA nucleotide. In certain embodiments the L-DNA is L-deoxyribocytidine. In some embodiments (N′)_{y} comprises L-DNA at position 18. In other embodiments (N′)y comprises L-DNA at positions 17 and 18. In certain embodiments (N′)y comprises L-DNA substitutions at positions 2 and at one or both of positions 17 and 18. In certain embodiments (N′)y further comprises a 5′ terminal cap nucleotide such as 5′-O-methyl DNA or an abasic or inverted abasic pseudo-nucleotide as an overhang.

[0187] In yet other embodiments (N′)y comprises at least one nucleotide mismatch relative to the RTP801L gene. In certain preferred embodiments, (N′)y comprises a single nucleotide mismatch on position 6, 14, or 15.

[0188] In yet other embodiments (N′)y comprises a DNA at position 15 and L-DNA at one or both of positions 17 and 18. In that structure, position 2 may further comprise an L-DNA or an abasic pseudo-nucleotide.

[0189] Other embodiments of Structure C are envisaged wherein x=y=21 or wherein x=y=23; in these embodiments the modifications for (N′)y discussed above instead of being on positions 15, 16, 17, 18 are on positions 17, 18, 19, 20 for 21 mer and on positions 19, 20, 21, 22 for 23 mer; similarly the modifications at one or both of positions 17 and 18 are on one or both of positions 19 or 20 for the 21 mer and one or both of positions 21 and 22 for the 23 mer. All modifications in the 19 mer are similarly adjusted for the 21 and 23 mers.

[0190] According to various embodiments of Structure (C), in (N′)y 2, 3, 4, 5, 6, 7, 8, 9, 10, 11, 12, 13 or 14 consecutive ribonucleotides at the 3′ terminus are linked by 2′-5′ internucleotide linkages. In one preferred embodiment, four consecutive nucleotides at the 3′ terminus of (N′)y are joined by three 2′-5′ phosphodiester bonds, wherein one or more of the 2′-5′ nucleotides which form the 2′-5′ phosphodiester bonds further comprises a 3′-O-methyl sugar modification. Preferably the 3′ terminal nucleotide of (N′)y comprises a 2′-O-methyl sugar modification. In certain preferred embodiments of Structure C, x=y=19 and in (N′)y two or more consecutive nucleotides at positions 15, 16, 17, 18 and 19 comprise a nucleotide joined to an adjacent nucleotide by a 2′-5′ internucleotide bond. In various embodiments the nucleotide forming the 2′-5′ internucleotide bond comprises a 3′ deoxyribose nucleotide or a 3′ methoxy nucleotide. In some embodiments the nucleotides at positions 17 and 18 in (N′)y are joined by a 2′-5′ internucleotide bond. In other embodiments the nucleotides at positions 16, 17, 18, 16-17, 17-18, or 16-18 in (N′)y are joined by a 2′-5′ internucleotide bond.

[0191] In certain embodiments (N′)y comprises an L-DNA at position 2 and 2′-5′ internucleotide bonds at positions 16, 17, 18, 16-17, 17-18, or 16-18. In certain embodiments (N′)y comprises 2′-5′ internucleotide bonds at positions 16, 17, 18, 16-17, 17-18, or 16-18 and a 5′ terminal cap nucleotide.

[0192] According to various embodiments of Structure (C), in (N′)y 2, 3, 4, 5, 6, 7, 8, 9, 10, 11, 12, 13 or 14 consecutive nucleotides at either terminus or 2-8 modified nucleotides at each of the 5′ and 3′ termini are independently mirror nucleotides. In some embodiments the mirror nucleotide is an L-ribonucleotide. In other embodiments the mirror nucleotide is an L-deoxyribonucleotide. The mirror nucleotide may further be modified at the sugar or base moiety or in an internucleotide linkage.

[0193] In one preferred embodiment of Structure (C), the 3′ terminal nucleotide or two or three consecutive nucleotides at the 3′ terminus of (N′)y are L-deoxyribonucleotides.

[0194] In other embodiments of Structure (C), in (N′)y 2, 3, 4, 5, 6, 7, 8, 9, 10, 11, 12, 13 or 14 consecutive ribonucleotides at either terminus or 2-8 modified nucleotides at each of the 5′ and 3′ termini are independently 2′ sugar modified nucleotides. In some embodiments the 2′ sugar modification comprises the presence of an amino, a fluoro, an alkoxy or an alkyl moiety. In certain embodiments the 2′ sugar modification comprises a methoxy moiety (2′-OMe). In one series of preferred embodiments, three, four or five consecutive nucleotides at the 5′ terminus of (N′)y comprise the 2′-OMe modification. In another preferred embodiment, three consecutive nucleotides at the 3′ terminus of (N′)y comprise the 2′-O-methyl modification.

[0195] In some embodiments of Structure (C), in (N′)y 2, 3, 4, 5, 6, 7, 8, 9, 10, 11, 12, 13 or 14 consecutive ribonucleotides at either or 2-8 modified nucleotides at each of the 5′ and 3′ termini are independently bicyclic nucleotide. In various embodiments the bicyclic nucleotide is a locked nucleic acid (LNA). A 2′-O, 4′-C-ethylene-bridged nucleic acid (ENA) is a species of LNA (see below).

[0196] In various embodiments (N′)y comprises modified nucleotides at the 5′ terminus or at both the 3′ and 5′ termini.

[0197] In some embodiments of Structure (C), at least two nucleotides at either or both the 5′ and 3′ termini of (N′)y are joined by P-ethoxy backbone modifications. In certain preferred embodiments x=y=19 or x=y=23; in (N)x the nucleotides alternate between modified ribonucleotides and unmodified ribonucleotides, each modified ribonucleotide being modified so as to have a 2′-O-methyl on its sugar and the ribonucleotide located at the middle position of (N)x being unmodified; and four consecutive nucleotides at the 3′ terminus or at the 5′ terminus of (N′)y are joined by three P-ethoxy backbone modifications. In another preferred embodiment, three consecutive nucleotides at the 3′ terminus or at the 5′ terminus of (N′)y are joined by two P-ethoxy backbone modifications.

[0198] In some embodiments of Structure (C), in (N′)y 2, 3, 4, 5, 6, 7 or 8, consecutive ribonucleotides at each of the 5′ and 3′ termini are independently mirror nucleotides, nucleotides joined by 2′-5′ phosphodiester bond, 2′ sugar modified nucleotides or bicyclic nucleotide. In one embodiment, the modification at the 5′ and 3′ termini of (N′)y is identical. In one preferred embodiment, four consecutive nucleotides at the 5′ terminus of (N′)y are joined by three 2′-5′ phosphodiester bonds and three consecutive nucleotides at the 3′ terminus of (N′)y are joined by two 2′-5′ phosphodiester bonds. In another embodiment, the modification at the 5′ terminus of (N′)y is different from the modification at the 3′ terminus of (N′)y. In one specific embodiment, the modified nucleotides at the 5′ terminus of (N′)y are mirror nucleotides and the modified nucleotides at the 3′ terminus of (N′)y are joined by 2′-5′ phosphodiester bond. In another specific embodiment, three consecutive nucleotides at the 5′ terminus of (N′)y are LNA nucleotides and three consecutive nucleotides at the 3′ terminus of (N′)y are joined by two 2′-5′ phosphodiester bonds. In (N)x the nucleotides alternate between modified ribonucleotides and unmodified ribonucleotides, each modified ribonucleotide being modified so as to have a 2′-O-methyl on its sugar and the ribonucleotide located at the middle of (N)x being unmodified, or the ribonucleotides in (N)x being unmodified

[0199] In another embodiment of Structure (C), the present invention provides a compound wherein x=y=19 or x=y=23; in (N)x the nucleotides alternate between modified ribonucleotides and unmodified ribonucleotides, each modified ribonucleotide being modified so as to have a 2′-O-methyl on its sugar and the ribonucleotide located at the middle of (N)x being unmodified; three nucleotides at the 3′ terminus of (N′)y are joined by two 2′-5′ phosphodiester bonds and three nucleotides at the 5′ terminus of (N′)y are LNA such as ENA.

[0200] In another embodiment of Structure (C), five consecutive nucleotides at the 5′ terminus of (N′)y comprise the 2′-O-methyl sugar modification and two consecutive nucleotides at the 3′ terminus of (N′)y are L-DNA.

[0201] In yet another embodiment, the present invention provides a compound wherein x=y=19 or x=y=23; (N)x consists of unmodified ribonucleotides; three consecutive nucleotides at the 3′ terminus of (N′)y are joined by two 2′-5′ phosphodiester bonds and three consecutive nucleotides at the 5′ terminus of (N′)y are LNA such as ENA.

[0202] According to other embodiments of Structure (C), in (N′)y the 5′ or 3′ terminal nucleotide, or 2, 3, 4, 5 or 6 consecutive nucleotides at either termini or 1-4 modified nucleotides at each of the 5′ and 3′ termini are independently phosphonocarboxylate or phosphinocarboxylate nucleotides (PACE nucleotides). In some embodiments the PACE nucleotides are deoxyribonucleotides. In some preferred embodiments in (N′)y, 1 or 2 consecutive nucleotides at each of the 5′ and 3′ termini are PACE nucleotides. Examples of PACE nucleotides and analogs are disclosed in U.S. Pat. Nos. 6,693,187 and 7,067,641 both incorporated by reference.

[0203] In additional embodiments, the present invention provides a compound having Structure (D):

| | | |
|---|---|---|
| (D) | 5′ (N)x-Z 3′ | antisense strand |
| | 3′ Z′-(N′)y 5′ | sense strand |

wherein each of N and N′ is a nucleotide selected from an unmodified ribonucleotide, a modified ribonucleotide, an unmodified deoxyribonucleotide or a modified deoxyribonucleotide;
wherein each of (N)x and (N′)y is an oligomer in which each consecutive nucleotide is joined to the next nucleotide by a covalent bond and each of x and y is an integer between 18 and 40;
wherein (N)x comprises unmodified ribonucleotides further comprising one modified nucleotide at the 3′ terminal or penultimate position, wherein the modified nucleotide is selected from the group consisting of a bicyclic nucleotide, a 2′ sugar modified nucleotide, a mirror nucleotide, an altritol nucleotide, or a nucleotide joined to an adjacent nucleotide by an internucleotide linkage selected from a 2′-5′ phosphodiester bond, a P-alkoxy linkage or a PACE linkage;
wherein (N′)y comprises unmodified ribonucleotides further comprising one modified nucleotide at the 5′ terminal or penultimate position, wherein the modified nucleotide is selected from the group consisting of a bicyclic nucleotide, a 2′ sugar modified nucleotide, a mirror nucleotide, an altritol nucleotide, or a nucleotide joined to an adjacent nucleotide by an internucleotide linkage selected from a 2′-5′ phosphodiester bond, a P-alkoxy linkage or a PACE linkage;
wherein in each of (N)x and (N′)y modified and unmodified nucleotides are not alternating;
wherein each of Z and Z′ may be present or absent, but if present is 1-5 deoxyribonucleotides covalently attached at the 3′ terminus of any oligomer to which it is attached;
wherein the sequence of (N′)_{y} is a sequence substantially complementary to (N)x; and wherein the sequence of (N)ₓ comprises an antisense sequence having substantial identity to about 18 to about 40 consecutive ribonucleotides in an mRNA transcribed from the RTP801L gene.

[0204] In one embodiment of Structure (D), x=y=19 or x=y=23; (N)x comprises unmodified ribonucleotides in which two consecutive nucleotides linked by one 2′-5′ internucleotide linkage at the 3′ terminus; and (N′)y comprises unmodified ribonucleotides in which two consecutive nucleotides linked by one 2′-5′ internucleotide linkage at the 5′ terminus.

[0205] In some embodiments, x=y=19 or x=y=23; (N)x comprises unmodified ribonucleotides in which three consecutive nucleotides at the 3′ terminus are joined together by two 2′-5′ phosphodiester bonds; and (N′)y comprises unmodified ribonucleotides in which four consecutive nucleotides at the 5′ terminus are joined together by three 2′-5′ phosphodiester bonds (set forth herein as Structure II).

[0206] According to various embodiments of Structure (D) 2, 3, 4, 5, 6, 7, 8, 9, 10, 11, 12, 13 or 14 consecutive ribonucleotides starting at the ultimate or penultimate position of the 3′ terminus of (N)x and 2, 3, 4, 5, 6, 7, 8, 9, 10, 11, 12, 13 or 14 consecutive ribonucleotides starting at the ultimate or penultimate position of the 5′ terminus of (N′)y are linked by 2′-5′ internucleotide linkages.

[0207] According to one preferred embodiment of Structure (D), four consecutive nucleotides at the 5′ terminus of (N′)y are joined by three 2′-5′ phosphodiester bonds and three consecutive nucleotides at the 3′ terminus of (N′)x are joined by two 2′-5′ phosphodiester bonds. Three nucleotides at the 5′ terminus of (N′)y and two nucleotides at the 3′ terminus of (N′)x may also comprise 3′-O-methyl modifications.

[0208] According to various embodiments of Structure (D), 2, 3, 4, 5, 6, 7, 8, 9, 10, 11, 12, 13 or 14 consecutive nucleotides starting at the ultimate or penultimate position of the 3′ terminus of (N)x and 2, 3, 4, 5, 6, 7, 8, 9, 10, 11, 12, 13 or 14 consecutive ribonucleotides starting at the ultimate or penultimate position of the 5′ terminus of (N′)y are independently mirror nucleotides. In some embodiments the mirror is an L-ribonucleotide. In other embodiments the mirror nucleotide is L-deoxyribonucleotide.

[0209] In other embodiments of Structure (D), 2, 3, 4, 5, 6, 7, 8, 9, 10, 11, 12, 13 or 14 consecutive ribonucleotides starting at the ultimate or penultimate position of the 3′ terminus of (N)x and 2, 3, 4, 5, 6, 7, 8, 9, 10, 11, 12, 13 or 14 consecutive ribonucleotides starting at the ultimate or penultimate position of the 5′ terminus of (N′)y are independently 2′ sugar modified nucleotides. In some embodiments the 2′ sugar modification comprises the presence of an amino, a fluoro, an alkoxy or an alkyl moiety. In certain embodiments the 2′ sugar modification comprises a methoxy moiety (2′-OMe).

[0210] In one preferred embodiment of Structure (D), five consecutive nucleotides at the 5′ terminus of (N′)y comprise the 2′-O-methyl modification and five consecutive nucleotides at the 3′ terminus of (N′)x comprise the 2′-O-methyl modification. In another preferred embodiment of Structure (D), ten consecutive nucleotides at the 5′ terminus of (N′)_{y} comprise the 2′-O-methyl modification and five consecutive nucleotides at the 3′ terminus of (N′)x comprise the 2′-O-methyl modification. In another preferred embodiment of Structure (D), thirteen consecutive nucleotides at the 5′ terminus of (N′)y comprise the 2′-O-methyl modification and five consecutive nucleotides at the 3′ terminus of (N′)ₓ comprise the 2′-O-methyl modification.

[0211] In some embodiments of Structure (D), in (N′)y 2, 3, 4, 5, 6, 7, 8, 9, 10, 11, 12, 13 or 14 consecutive ribonucleotides starting at the ultimate or penultimate position of the 3′ terminus of (N)x and 2, 3, 4, 5, 6, 7, 8, 9, 10, 11, 12, 13 or 14 consecutive ribonucleotides starting at the ultimate or penultimate position of the 5′ terminus of (N′)y are independently a bicyclic nucleotide. In various embodiments the bicyclic nucleotide is a locked nucleic acid (LNA) such as a 2′-O, 4′-C-ethylene-bridged nucleic acid (ENA).

[0212] In various embodiments of Structure (D), (N′)y comprises a modified nucleotide selected from a bicyclic nucleotide, a 2′ sugar modified nucleotide, a mirror nucleotide, an altritol nucleotide or a nucleotide joined to an adjacent nucleotide by an internucleotide linkage selected from a 2′-5′ phosphodiester bond, a P-alkoxy linkage or a PACE linkage;

[0213] In various embodiments of Structure (D), (N)x comprises a modified nucleotide selected from a bicyclic nucleotide, a 2′ sugar modified nucleotide, a mirror nucleotide, an altritol nucleotide or a nucleotide joined to an adjacent nucleotide by an internucleotide linkage selected from a 2′-5′ phosphodiester bond, a P-alkoxy linkage or a PACE linkage;

[0214] In embodiments wherein each of the 3′ and 5′ termini of the same strand comprises a modified nucleotide, the modification at the 5′ and 3′ termini is identical. In another embodiment, the modification at the 5′ terminus is different from the modification at the 3′ terminus of the same strand. In one specific embodiment, the modified nucleotides at the 5′ terminus are mirror nucleotides and the modified nucleotides at the 3′ terminus of the same strand are joined by 2′-5′ phosphodiester bond.

[0215] In one specific embodiment of Structure (D), five consecutive nucleotides at the 5′ terminus of (N′)y comprise the 2′-O-methyl modification and two consecutive nucleotides at the 3′ terminus of (N′)y are L-DNA. In addition, the compound may further comprise five consecutive 2′-O-methyl modified nucleotides at the 3′ terminus of (N′)x.

[0216] In various embodiments of Structure (D), the modified nucleotides in (N)x are different from the modified nucleotides in (N′)y. For example, the modified nucleotides in (N)x are 2′ sugar modified nucleotides and the modified nucleotides in (N′)y are nucleotides linked by 2′-5′ internucleotide linkages. In another example, the modified nucleotides in (N)x are mirror nucleotides and the modified nucleotides in (N′)y are nucleotides linked by 2′-5′ internucleotide linkages. In another example, the modified nucleotides in (N)x are nucleotides linked by 2′-5′ internucleotide linkages and the modified nucleotides in (N′)y are mirror nucleotides.

[0217] In additional embodiments, the present invention provides a compound having Structure (E):

| | | |
|---|---|---|
| (E) | 5′ (N)x-Z 3′ | antisense strand |
| | 3′ Z′-(N′)y 5′ | sense strand |

wherein each of N and N′ is a nucleotide selected from an unmodified ribonucleotide, a modified ribonucleotide, an unmodified deoxyribonucleotide or a modified deoxyribonucleotide;
wherein each of (N)x and (N′)y is an oligomer in which each consecutive nucleotide is joined to the next nucleotide by a covalent bond and each of x and y is an integer between 18 and 40;
wherein (N)x comprises unmodified ribonucleotides further comprising one modified nucleotide at the 5′ terminal or penultimate position, wherein the modified nucleotide is selected from the group consisting of a bicyclic nucleotide, a 2′ sugar modified nucleotide, a mirror nucleotide, an altritol nucleotide, or a nucleotide joined to an adjacent nucleotide by an internucleotide linkage selected from a 2′-5′ phosphodiester bond, a P-alkoxy linkage or a PACE linkage;
wherein (N′)y comprises unmodified ribonucleotides further comprising one modified nucleotide at the 3′ terminal or penultimate position, wherein the modified nucleotide is selected from the group consisting of a bicyclic nucleotide, a 2′ sugar modified nucleotide, a mirror nucleotide, an altritol nucleotide, or a nucleotide joined to an adjacent nucleotide by an internucleotide linkage selected from a 2′-5′ phosphodiester bond, a P-alkoxy linkage or a PACE linkage;
wherein in each of (N)x and (N′)y modified and unmodified nucleotides are not alternating;
wherein each of Z and Z′ may be present or absent, but if present is 1-5 deoxyribonucleotides covalently attached at the 3′ terminus of any oligomer to which it is attached;
wherein the sequence of (N′)_{y} is a sequence substantially complementary to (N)x; and wherein the sequence of (N)ₓ comprises an antisense sequence having substantial identity to about 18 to about 40 consecutive ribonucleotides in an mRNA transcribed from the RTP801L gene.

[0218] In certain preferred embodiments the ultimate nucleotide at the 5′ terminus of (N)x is unmodified.

[0219] According to various embodiments of Structure (E) 2, 3, 4, 5, 6, 7, 8, 9, 10, 11, 12, 13 or 14 consecutive ribonucleotides starting at the ultimate or penultimate position of the 5′ terminus of (N)x, preferably starting at the 5′ penultimate position, and 2, 3, 4, 5, 6, 7, 8, 9, 10, 11, 12, 13 or 14 consecutive ribonucleotides starting at the ultimate or penultimate position of the 3′ terminus of (N′)y are linked by 2′-5′ internucleotide linkages.

[0220] According to various embodiments of Structure (E), 2, 3, 4, 5, 6, 7, 8, 9, 10, 11, 12, 13 or 14 consecutive nucleotides starting at the ultimate or penultimate position of the 5′ terminus of (N)x, preferably starting at the 5′ penultimate position, and 2, 3, 4, 5, 6, 7, 8, 9, 10, 11, 12, 13 or 14 consecutive nucleotides starting at the ultimate or penultimate position of the 3′ terminus of (N′)y are independently mirror nucleotides. In some embodiments the mirror is an L-ribonucleotide. In other embodiments the mirror nucleotide is L-deoxyribonucleotide.

[0221] In other embodiments of Structure (E), 2, 3, 4, 5, 6, 7, 8, 9, 10, 11, 12, 13 or 14 consecutive ribonucleotides starting at the ultimate or penultimate position of the 5′ terminus of (N)x, preferably starting at the 5′ penultimate position, and 2, 3, 4, 5, 6, 7, 8, 9, 10, 11, 12, 13 or 14 consecutive ribonucleotides starting at the ultimate or penultimate position of the 3′ terminus of (N′)y are independently 2′ sugar modified nucleotides. In some embodiments the 2′ sugar modification comprises the presence of an amino, a fluoro, an alkoxy or an alkyl moiety. In certain embodiments the 2′ sugar modification comprises a methoxy moiety (2′-OMe).

[0222] In some embodiments of Structure (E), in (N′)y 2, 3, 4, 5, 6, 7, 8, 9, 10, 11, 12, 13 or 14 consecutive ribonucleotides starting at the ultimate or penultimate position of the 5′ terminus of (N)x, preferably starting at the 5′ penultimate position, and 2, 3, 4, 5, 6, 7, 8, 9, 10, 11, 12, 13 or 14 consecutive ribonucleotides starting at the ultimate or penultimate position of the 3′ terminus of (N′)y are independently a bicyclic nucleotide. In various embodiments the bicyclic nucleotide is a locked nucleic acid (LNA) such as a 2′-O, 4′-C-ethylene-bridged nucleic acid (ENA).

[0223] In various embodiments of Structure (E), (N′)y comprises modified nucleotides selected from a bicyclic nucleotide, a 2′ sugar modified nucleotide, a mirror nucleotide, an altritol nucleotide, a nucleotide joined to an adjacent nucleotide by a P-alkoxy backbone modification or a nucleotide joined to an adjacent nucleotide by an internucleotide linkage selected from a 2′-5′ phosphodiester bond, a P-alkoxy linkage or a PACE linkage at the 3′ terminus or at each of the 3′ and 5′ termini.

[0224] In various embodiments of Structure (E), (N)x comprises a modified nucleotide selected from a bicyclic nucleotide, a 2′ sugar modified nucleotide, a mirror nucleotide, an altritol nucleotide, or a nucleotide joined to an adjacent nucleotide by an internucleotide linkage selected from a 2′-5′ phosphodiester bond, a P-alkoxy linkage or a PACE linkage at the 5′ terminus or at each of the 3′ and 5′ termini.

[0225] In one embodiment where both 3′ and 5′ termini of the same strand comprise a modified nucleotide, the modification at the 5′ and 3′ termini is identical. In another embodiment, the modification at the 5′ terminus is different from the modification at the 3′ terminus of the same strand. In one specific embodiment, the modified nucleotides at the 5′ terminus are mirror nucleotides and the modified nucleotides at the 3′ terminus of the same strand are joined by 2′-5′ phosphodiester bond.

[0226] In various embodiments of Structure (E), the modified nucleotides in (N)x are different from the modified nucleotides in (N′)y. For example, the modified nucleotides in (N)x are 2′ sugar modified nucleotides and the modified nucleotides in (N′)y are nucleotides linked by 2′-5′ internucleotide linkages. In another example, the modified nucleotides in (N)x are mirror nucleotides and the modified nucleotides in (N′)y are nucleotides linked by 2′-5′ internucleotide linkages. In another example, the modified nucleotides in (N)x are nucleotides linked by 2′-5′ internucleotide linkages and the modified nucleotides in (N′)y are mirror nucleotides.

[0227] In additional embodiments, the present invention provides a compound having Structure (F):

| | | |
|---|---|---|
| (F) | 5′ (N)x-Z 3′ | antisense strand |
| | 3′ Z′-(N′)y 5′ | sense strand |

wherein each of N and N′ is a nucleotide selected from an unmodified ribonucleotide, a modified ribonucleotide, an unmodified deoxyribonucleotide or a modified deoxyribonucleotide;
wherein each of (N)x and (N′)y is an oligomer in which each consecutive nucleotide is joined to the next nucleotide by a covalent bond and each of x and y is an integer between 18 and 40;
wherein each of (N)x and (N′)y comprise unmodified ribonucleotides in which each of (N)x and (N′)y independently comprise one modified nucleotide at the 3′ terminal or penultimate position wherein the modified nucleotide is selected from the group consisting of a bicyclic nucleotide, a 2′ sugar modified nucleotide, a mirror nucleotide, a nucleotide joined to an adjacent nucleotide by a P-alkoxy backbone modification or a nucleotide joined to an adjacent nucleotide by a 2′-5′ phosphodiester bond;
wherein in each of (N)x and (N′)y modified and unmodified nucleotides are not alternating;
wherein each of Z and Z′ may be present or absent, but if present is 1-5 deoxyribonucleotides covalently attached at the 3′ terminus of any oligomer to which it is attached;
wherein the sequence of (N′)_{y} is a sequence substantially complementary to (N)x; and wherein the sequence of (N)ₓ comprises an antisense sequence having substantial identity to about 18 to about 40 consecutive ribonucleotides in an mRNA transcribed from the RTP801L gene.

[0228] In some embodiments of Structure (F), x=y=19 or x=y=23; (N′)y comprises unmodified ribonucleotides in which two consecutive nucleotides at the 3′ terminus comprises two consecutive mirror deoxyribonucleotides; and (N)x comprises unmodified ribonucleotides in which one nucleotide at the 3′ terminus comprises a mirror deoxyribonucleotide (set forth as Structure III).

[0229] According to various embodiments of Structure (F) 2, 3, 4, 5, 6, 7, 8, 9, 10, 11, 12, 13 or 14 consecutive ribonucleotides independently beginning at the ultimate or penultimate position of the 3′ termini of (N)x and (N′)y are linked by 2′-5′ internucleotide linkages.

[0230] According to one preferred embodiment of Structure (F), three consecutive nucleotides at the 3′ terminus of (N′)y are joined by two 2′-5′ phosphodiester bonds and three consecutive nucleotides at the 3′ terminus of (N′)x are joined by two 2′-5′ phosphodiester bonds.

[0231] According to various embodiments of Structure (F), 2, 3, 4, 5, 6, 7, 8, 9, 10, 11, 12, 13 or 14 consecutive nucleotides independently beginning at the ultimate or penultimate position of the 3′ termini of (N)x and (N′)y are independently mirror nucleotides. In some embodiments the mirror nucleotide is an L-ribonucleotide. In other embodiments the mirror nucleotide is an L-deoxyribonucleotide.

[0232] In other embodiments of Structure (F), 2, 3, 4, 5, 6, 7, 8, 9, 10, 11, 12, 13 or 14 consecutive ribonucleotides independently beginning at the ultimate or penultimate position of the 3′ termini of (N)x and (N′)y are independently 2′ sugar modified nucleotides. In some embodiments the 2′ sugar modification comprises the presence of an amino, a fluoro, an alkoxy or an alkyl moiety. In certain embodiments the 2′ sugar modification comprises a methoxy moiety (2′-OMe).

[0233] In some embodiments of Structure (F), 2, 3, 4, 5, 6, 7, 8, 9, 10, 11, 12, 13 or 14 consecutive ribonucleotides independently beginning at the ultimate or penultimate position of the 3′ termini of (N)x and (N′)y are independently a bicyclic nucleotide. In various embodiments the bicyclic nucleotide is a locked nucleic acid (LNA) such as a 2′-O, 4′-C-ethylene-bridged nucleic acid (ENA).

[0234] In various embodiments of Structure (F), (N′)y comprises a modified nucleotide selected from a bicyclic nucleotide, a 2′ sugar modified nucleotide, a mirror nucleotide, an altritol nucleotide, or a nucleotide joined to an adjacent nucleotide by an internucleotide linkage selected from a 2′-5′ phosphodiester bond, a P-alkoxy linkage or a PACE linkage at the 3′ terminus or at both the 3′ and 5′ termini.

[0235] In various embodiments of Structure (F), (N)x comprises a modified nucleotide selected from a bicyclic nucleotide, a 2′ sugar modified nucleotide, a mirror nucleotide, an altritol nucleotide, or a nucleotide joined to an adjacent nucleotide by an internucleotide linkage selected from a 2′-5′ phosphodiester bond, a P-alkoxy linkage or a PACE linkage at the 3′ terminus or at each of the 3′ and 5′ termini.

[0236] In one embodiment where each of 3′ and 5′ termini of the same strand comprise a modified nucleotide, the modification at the 5′ and 3′ termini is identical. In another embodiment, the modification at the 5′ terminus is different from the modification at the 3′ terminus of the same strand. In one specific embodiment, the modified nucleotides at the 5′ terminus are mirror nucleotides and the modified nucleotides at the 3′ terminus of the same strand are joined by 2′-5′ phosphodiester bond.

[0237] In various embodiments of Structure (F), the modified nucleotides in (N)x are different from the modified nucleotides in (N′)y. For example, the modified nucleotides in (N)x are 2′ sugar modified nucleotides and the modified nucleotides in (N′)y are nucleotides linked by 2′-5′ internucleotide linkages. In another example, the modified nucleotides in (N)ₓ are mirror nucleotides and the modified nucleotides in (N′)y are nucleotides linked by 2′-5′ internucleotide linkages. In another example, the modified nucleotides in (N)x are nucleotides linked by 2′-5′ internucleotide linkages and the modified nucleotides in (N′)_{y} are mirror nucleotides.

[0238] In additional embodiments, the present invention provides a compound having Structure (G):

| | | |
|---|---|---|
| (G) | 5′ (N)x-Z 3′ | antisense strand |
| | 3′ Z′-(N′)y 5′ | sense strand |

wherein each of N and N′ is a nucleotide selected from an unmodified ribonucleotide, a modified ribonucleotide, an unmodified deoxyribonucleotide or a modified deoxyribonucleotide;
wherein each of (N)x and (N′)y is an oligomer in which each consecutive nucleotide is joined to the next nucleotide by a covalent bond and each of x and y is an integer between 18 and 40;
wherein each of (N)x and (N′)y comprise unmodified ribonucleotides in which each of (N)x and (N′)y independently comprise one modified nucleotide at the 5′ terminal or penultimate position wherein the modified nucleotide is selected from the group consisting of a bicyclic nucleotide, a 2′ sugar modified nucleotide, a mirror nucleotide, a nucleotide joined to an adjacent nucleotide by a P-alkoxy backbone modification or a nucleotide joined to an adjacent nucleotide by a 2′-5′ phosphodiester bond;
wherein for (N)x the modified nucleotide is preferably at penultimate position of the 5′ terminal;
wherein in each of (N)x and (N′)y modified and unmodified nucleotides are not alternating;
wherein each of Z and Z′ may be present or absent, but if present is 1-5 deoxyribonucleotides covalently attached at the 3′ terminus of any oligomer to which it is attached;
wherein the sequence of (N′)_{y} is a sequence substantially complementary to (N)x; and wherein the sequence of (N)ₓ comprises an antisense sequence having substantial identity to about 18 to about 40 consecutive ribonucleotides in an mRNA transcribed from the RTP801L gene.

[0239] In some embodiments of Structure (G), x=y=19 or x=y=23.

[0240] According to various embodiments of Structure (G) 2, 3, 4, 5, 6, 7, 8, 9, 10, 11, 12, 13 or 14 consecutive ribonucleotides independently beginning at the ultimate or penultimate position of the 5′ termini of (N)x and (N′)y are linked by 2′-5′ internucleotide linkages. For (N)x the modified nucleotides preferably starting at the penultimate position of the 5′ terminal.

[0241] According to various embodiments of Structure (G), 2, 3, 4, 5, 6, 7, 8, 9, 10, 11, 12, 13 or 14 consecutive nucleotides independently beginning at the ultimate or penultimate position of the 5′ termini of (N)x and (N′)y are independently mirror nucleotides. In some embodiments the mirror nucleotide is an L-ribonucleotide. In other embodiments the mirror nucleotide is an L-deoxyribonucleotide. For (N)x the modified nucleotides preferably starting at the penultimate position of the 5′ terminal.

[0242] In other embodiments of Structure (G), 2, 3, 4, 5, 6, 7, 8, 9, 10, 11, 12, 13 or 14 consecutive ribonucleotides independently beginning at the ultimate or penultimate position of the 5′ termini of (N)x and (N′)y are independently 2′ sugar modified nucleotides. In some embodiments the 2′ sugar modification comprises the presence of an amino, a fluoro, an alkoxy or an alkyl moiety. In certain embodiments the 2′ sugar modification comprises a methoxy moiety (2′-OMe). In some preferred embodiments the consecutive modified nucleotides preferably begin at the penultimate position of the 5′ terminus of (N)x.

[0243] In one preferred embodiment of Structure (G), five consecutive ribonucleotides at the 5′ terminus of (N′)y comprise a 2′-O-methyl modification and one ribonucleotide at the 5′ penultimate position of (N′)x comprises a 2′-O-methyl modification. In another preferred embodiment of Structure (G), five consecutive ribonucleotides at the 5′ terminus of (N′)_{y} comprise a 2′-O-methyl modification and two consecutive ribonucleotides at the 5′ terminal position of (N′)x comprise a 2′-O-methyl modification.

[0244] In some embodiments of Structure (G), 2, 3, 4, 5, 6, 7, 8, 9, 10, 11, 12, 13 or 14 consecutive ribonucleotides independently beginning at the ultimate or penultimate position of the 5′ termini of (N)x and (N′)y are bicyclic nucleotides. In various embodiments the bicyclic nucleotide is a locked nucleic acid (LNA) such as a 2′-O, 4′-C-ethylene-bridged nucleic acid (ENA). In some preferred embodiments the consecutive modified nucleotides preferably begin at the penultimate position of the 5′ terminus of (N)x.

[0245] In various embodiments of Structure (G), (N′)y comprises a modified nucleotide selected from a bicyclic nucleotide, a 2′ sugar modified nucleotide, a mirror nucleotide, an altritol nucleotide, or a nucleotide joined to an adjacent nucleotide by an internucleotide linkage selected from a 2′-5′ phosphodiester bond, a P-alkoxy linkage or a PACE linkage at the 5′ terminus or at each of the 3′ and 5′ termini.

[0246] In various embodiments of Structure (G), (N)x comprises a modified nucleotide selected from a bicyclic nucleotide, a 2′ sugar modified nucleotide, a mirror nucleotide, an altritol nucleotide, or a nucleotide joined to an adjacent nucleotide by an internucleotide linkage selected from a 2′-5′ phosphodiester bond, a P-alkoxy linkage or a PACE linkage at the 5′ terminus or at each of the 3′ and 5′ termini.

[0247] In one embodiment where each of 3′ and 5′ termini of the same strand comprise a modified nucleotide, the modification at the 5′ and 3′ termini is identical. In another embodiment, the modification at the 5′ terminus is different from the modification at the 3′ terminus of the same strand. In one specific embodiment, the modified nucleotides at the 5′ terminus are mirror nucleotides and the modified nucleotides at the 3′ terminus of the same strand are joined by 2′-5′ phosphodiester bond. In various embodiments of Structure (G), the modified nucleotides in (N)x are different from the modified nucleotides in (N′)y. For example, the modified nucleotides in (N)x are 2′ sugar modified nucleotides and the modified nucleotides in (N′)y are nucleotides linked by 2′-5′ internucleotide linkages. In another example, the modified nucleotides in (N)x are mirror nucleotides and the modified nucleotides in (N′)y are nucleotides linked by 2′-5′ internucleotide linkages. In another example, the modified nucleotides in (N)x are nucleotides linked by 2′-5′ internucleotide linkages and the modified nucleotides in (N′)y are mirror nucleotides.

[0248] In additional embodiments, the present invention provides a compound having Structure (H):

| | | |
|---|---|---|
| (H) | 5′ (N)x-Z 3′ | antisense strand |
| | 3′ Z′-(N′)y 5′ | sense strand |

wherein each of N and N′ is a nucleotide selected from an unmodified ribonucleotide, a modified ribonucleotide, an unmodified deoxyribonucleotide or a modified deoxyribonucleotide;
wherein each of (N)x and (N′)y is an oligomer in which each consecutive nucleotide is joined to the next nucleotide by a covalent bond and each of x and y is an integer between 18 and 40;
wherein (N)x comprises unmodified ribonucleotides further comprising one modified nucleotide at the 3′ terminal or penultimate position or the 5′ terminal or penultimate position, wherein the modified nucleotide is selected from the group consisting of a bicyclic nucleotide, a 2′ sugar modified nucleotide, a mirror nucleotide, an altritol nucleotide, or a nucleotide joined to an adjacent nucleotide by an internucleotide linkage selected from a 2′-5′ phosphodiester bond, a P-alkoxy linkage or a PACE linkage;
wherein (N′)y comprises unmodified ribonucleotides further comprising one modified nucleotide at an internal position, wherein the modified nucleotide is selected from the group consisting of a bicyclic nucleotide, a 2′ sugar modified nucleotide, a mirror nucleotide, an altritol nucleotide, or a nucleotide joined to an adjacent nucleotide by an internucleotide linkage selected from a 2′-5′ phosphodiester bond, a P-alkoxy linkage or a PACE linkage;
wherein in each of (N)x and (N′)y modified and unmodified nucleotides are not alternating;
wherein each of Z and Z′ may be present or absent, but if present is 1-5 deoxyribonucleotides covalently attached at the 3′ terminus of any oligomer to which it is attached;
wherein the sequence, of (N′)_{y} is a sequence substantially complementary to (N)x; and wherein the sequence of (N)ₓ comprises an antisense sequence having substantial identity to about 18 to about 40 consecutive ribonucleotides in an mRNA transcribed from the RTP801L gene.

[0249] In one embodiment of Structure (H), 2, 3, 4, 5, 6, 7, 8, 9, 10, 11, 12, 13 or 14 consecutive ribonucleotides independently beginning at the ultimate or penultimate position of the 3′ terminus or the 5′ terminus or both termini of (N)x are independently 2′ sugar modified nucleotides, bicyclic nucleotides, mirror nucleotides, altritol nucleotides or nucleotides joined to an adjacent nucleotide by a 2′-5′ phosphodiester bond and 2, 3, 4, 5, 6, 7, 8, 9, 10, 11, 12, 13 or 14 consecutive internal ribonucleotides in (N′)y are independently 2′ sugar modified nucleotides, bicyclic nucleotides, mirror nucleotides, altritol nucleotides or nucleotides joined to an adjacent nucleotide by a 2′-5′ phosphodiester bond. In some embodiments the 2′ sugar modification comprises the presence of an amino, a fluoro, an alkoxy or an alkyl moiety. In certain embodiments the 2′ sugar modification comprises a methoxy moiety (2′-OMe).

[0250] In another embodiment of Structure (H), 2, 3, 4, 5, 6, 7, 8, 9, 10, 11, 12, 13 or 14 consecutive ribonucleotides independently beginning at the ultimate or penultimate position of the 3′ terminus or the 5′ terminus or 2-8 consecutive nucleotides at each of 5′ and 3′ termini of (N′)y are independently 2′ sugar modified nucleotides, bicyclic nucleotides, mirror nucleotides, altritol nucleotides or nucleotides joined to an adjacent nucleotide by a 2′-5′ phosphodiester bond, and 2, 3, 4, 5, 6, 7, 8, 9, 10, 11, 12, 13 or 14 consecutive internal ribonucleotides in (N)x are independently 2′ sugar modified nucleotides, bicyclic nucleotides, mirror nucleotides, altritol nucleotides or nucleotides joined to an adjacent nucleotide by a 2′-5′ phosphodiester bond.

[0251] In one embodiment wherein each of 3′ and 5′ termini of the same strand comprises a modified nucleotide, the modification at the 5′ and 3′ termini is identical. In another embodiment, the modification at the 5′ terminus is different from the modification at the 3′ terminus of the same strand. In one specific embodiment, the modified nucleotides at the 5′ terminus are mirror nucleotides and the modified nucleotides at the 3′ terminus of the same strand are joined by 2′-5′ phosphodiester bond.

[0252] In various embodiments of Structure (H), the modified nucleotides in (N)x are different from the modified nucleotides in (N′)y. For example, the modified nucleotides in (N)x are 2′ sugar modified nucleotides and the modified nucleotides in (N′)y are nucleotides linked by 2′-5′ internucleotide linkages. In another example, the modified nucleotides in (N)x are mirror nucleotides and the modified nucleotides in (N′)y are nucleotides linked by 2′-5′ internucleotide linkages. In another example, the modified nucleotides in (N)x are nucleotides linked by 2′-5′ internucleotide linkages and the modified nucleotides in (N′)y are mirror nucleotides.

[0253] In one preferred embodiment of Structure (H), x=y=19; three consecutive ribonucleotides at the 9-11 nucleotide positions 9-11 of (N′)y comprise 2′-O-methyl modification and five consecutive ribonucleotides at the 3′ terminal position of (N′)x comprise 2′-O-methyl modification.

[0254] For all the above Structures (A)-(H), in various embodiments x=y and each of x and y is 19, 20, 21, 22 or 23. In certain embodiments, x=y=19. In yet other embodiments x=y=23. In additional embodiments the compound comprises modified ribonucleotides in alternating positions wherein each N at the 5′ and 3′ termini of (N)x are modified in their sugar residues and the middle ribonucleotide is not modified, e.g. ribonucleotide in position 10 in a 19-mer strand, position 11 in a 21 mer and position 12 in a 23-mer strand.

[0255] In some embodiments where x=y=21 or x=y=23 the position of modifications in the 19 mer are adjusted for the 21 and 23 mers with the proviso that the middle nucleotide of the antisense strand is preferably not modified.

[0256] In some embodiments, neither (N)x nor (N′)y are phosphorylated at the 3′ and 5′ termini.

[0257] In other embodiments either or both (N)x and (N′)y are phosphorylated at the 3′ termini. In yet another embodiment, either or both (N)x and (N′)y are phosphorylated at the 3′ termini using non-cleavable phosphate groups. In yet another embodiment, either or both (N)x and (N′)y are phosphorylated at the terminal 2′ termini position using cleavable or non-cleavable phosphate groups. These particular siRNA compounds are also blunt ended and are non-phosphorylated at the termini; however, comparative experiments have shown that siRNA compounds phosphorylated at one or both of the 3′-termini have similar activity in vivo compared to the non-phosphorylated compounds.

[0258] In certain embodiments for all the above-mentioned Structures, the compound is blunt ended, for example wherein both Z and Z′ are absent. In an alternative embodiment, the compound comprises at least one 3′ overhang, wherein at least one of Z or Z′ is present. Z and Z′ independently comprises one or more covalently linked modified or non-modified nucleotides, for example inverted dT or dA; dT, LNA, mirror nucleotide and the like. In some embodiments each of Z and Z′ are independently selected from dT and dTdT. siRNA in which Z and/or Z′ is present have similar activity and stability as siRNA in which Z and Z′ are absent.

[0259] In certain embodiments for all the above-mentioned Structures, the compound comprises one or more phosphonocarboxylate and for phosphinocarboxylate nucleotides (PACE nucleotides). In some embodiments the PACE nucleotides are deoxyribonucleotides and the phosphinocarboxylate nucleotides are phosphinoacetate nucleotides. Examples of PACE nucleotides and analogs are disclosed in U.S. Pat. Nos. 6,693,187 and 7,067,641, both incorporated herein by reference.

[0260] In certain embodiments for all the above-mentioned Structures, the compound comprises one or more locked nucleic acids (LNA) also defined as bridged nucleic acids or bicyclic nucleotides. Preferred locked nucleic acids are 2′-O, 4′-C-ethylene nucleosides (ENA) or 2′-O, 4′-C-methylene nucleosides. Other examples of LNA and ENA nucleotides are disclosed in WO 98/39352, WO 00/47599 and WO 99/14226, all incorporated herein by reference.

[0261] In certain embodiments for all the above-mentioned Structures, the compound comprises one or more altritol monomers (nucleotides), also defined as 1,5 anhydro-2-deoxy-D-altrito-hexitol (see for example, Allart, et al., 1998. Nucleosides & Nucleotides 17:1523-1526; Herdewijn et al., 1999. Nucleosides & Nucleotides 18:1371-1376; Fisher et al., 2007, NAR 35(4):1064-1074; all incorporated herein by reference).

[0262] The present invention explicitly excludes compounds in which each of N and for N′ is a deoxyribonucleotide (D-A, D-C, D-G, D-T). In certain embodiments (N)x and (N′)y may comprise independently 1, 2, 3, 4, 5, 6, 7, 8, 9 or more deoxyribonucleotides. In certain embodiments the present invention provides a compound wherein each of N is an unmodified ribonucleotide and the 3′ terminal nucleotide or 2, 3, 4, 5, 6, 7, 8, 9, 10, 11, 12, 13 or 14 consecutive nucleotides at the 3′ terminus of (N′)y are deoxyribonucleotides. In yet other embodiments each of N is an unmodified ribonucleotide and the 5′ terminal nucleotide or 2, 3, 4, 5, 6, 7, 8, 9, 10, 11, 12, 13 or 14 consecutive nucleotides at the 5′ terminus of (N′)y are deoxyribonucleotides. In further embodiments the 5′ terminal nucleotide or 2, 3, 4, 5, 6, 7, 8, or 9 consecutive nucleotides at the 5′ terminus and 1, 2, 3, 4, 5, or 6 consecutive nucleotides at the 3′ termini of (N)x are deoxyribonucleotides and each of N′ is an unmodified ribonucleotide. In yet further embodiments (N)x comprises unmodified ribonucleotides and 1 or 2, 3 or 4 consecutive deoxyribonucleotides independently at each of the 5′ and 3′ termini and 1 or 2, 3, 4, 5 or 6 consecutive deoxyribonucleotides in internal positions; and each of N′ is an unmodified ribonucleotide. In certain embodiments the 3′ terminal nucleotide or 2, 3, 4, 5, 6, 7, 8, 9, 10, 11, 12, 13 or 14 consecutive nucleotides at the 3′ terminus of (N′)y and the terminal 5′ nucleotide or 2, 3, 4, 5, 6, 7, 8, 9, 10, 11, 12, 13 or 14 consecutive nucleotides at the 5′ terminus of (N)x are deoxyribonucleotides. The present invention excludes compounds in which each of N and/or N′ is a deoxyribonucleotide. In some embodiments the 5′ terminal nucleotide of N or 2 or 3 consecutive of N and 1, 2, or 3 of N′ is a deoxyribonucleotide. Certain examples of active DNA/RNA siRNA chimeras are disclosed in US patent publication 2005/0004064, and Ui-Tei, 2008 (NAR 36(7):2136-2151) incorporated herein by reference in their entirety.

[0263] Unless otherwise indicated, in preferred embodiments of the structures discussed herein the covalent bond between each consecutive N or N′ is a phosphodiester bond.

[0264] An additional novel molecule provided by the present invention is an oligonucleotide comprising consecutive nucleotides wherein a first segment of such nucleotides encode a first inhibitory RNA molecule, a second segment of such nucleotides encode a second inhibitory RNA molecule, and a third segment of such nucleotides encode a third inhibitory RNA molecule. Each of the first, the second and the third segment may comprise one strand of a double stranded RNA and the first, second and third segments may be joined together by a linker. Further, the oligonucleotide may comprise three double stranded segments joined together by one or more linker.

[0265] Thus, one molecule provided by the present invention is an oligonucleotide comprising consecutive nucleotides which encode three inhibitory RNA molecules; said oligonucleotide may possess a triple stranded structure, such that three double stranded arms are linked together by one or more linker, such as any of the linkers presented hereinabove. This molecule forms a “star”-like structure, and may also be referred to herein as RNAstar. Such structures are disclosed in PCT patent publication WO 2007/091269, assigned to the assignee of the present invention and incorporated herein in its entirety by reference.

[0266] A covalent bond refers to an internucleotide linkage linking one nucleotide monomer to an adjacent nucleotide monomer. A covalent bond includes for example, a phosphodiester bond, a phosphorothioate bond, a P-alkoxy bond, a P-carboxy bond and the like. The normal internucleoside linkage of RNA and DNA is a 3′ to 5′ phosphodiester linkage. In certain preferred embodiments a covalent bond is a phosphodiester bond. Covalent bond encompasses non-phosphorous-containing internucleoside linkages, such as those disclosed in WO 2004/041924 inter alia. Unless otherwise indicated, in preferred embodiments of the structures discussed herein the covalent bond between each consecutive N or N′ is a phosphodiester bond.

[0267] For all of the structures above, in some embodiments the oligonucleotide sequence of (N)ₓ is fully complementary to the oligonucleotide sequence of (N′)y. In other embodiments (N)x and (N′)y are substantially complementary. In certain embodiments (N)x is fully complementary to a target sequence. In other embodiments (N)x is substantially complementary to a target sequence.

[0268] In some embodiments, neither (N)x nor (N′)y are phosphorylated at the 3′ and 5′ termini. In other embodiments either or both (N)x and (N′)y are phosphorylated at the 3′ termini (3′ Pi). In yet another embodiment, either or both (N)x and (N′)y are phosphorylated at the 3′ termini with non-cleavable phosphate groups. In yet another embodiment, either or both (N)x and (N′)y are phosphorylated at the terminal 2′ termini position using cleavable or non-cleavable phosphate groups. Further, the inhibitory nucleic acid molecules of the present invention may comprise one or more gaps and/or one or more nicks and/or one or more mismatches. Without wishing to be bound by theory, gaps, nicks and mismatches have the advantage of partially destabilizing the nucleic acid/siRNA, so that it may be more easily processed by endogenous cellular machinery such as DICER, DROSHA or RISC into its inhibitory components.

[0269] In the context of the present invention, a gap in a nucleic acid refers to the absence of one or more internal nucleotides in one strand, while a nick in a nucleic acid refers to the absence of an internucleotide linkage between two adjacent nucleotides in one strand. Any of the molecules of the present invention may contain one or more gaps and/or one or more nicks.

[0270] In one aspect the present invention provides a compound having Structure (I) set forth below:

| | | |
|---|---|---|
| (I) | 5′ (N)x-Z 3′ | (antisense strand) |
| | 3′ Z′-(N′)y-z″ 5′ | (sense strand) |

wherein each of N and N′ is a ribonucleotide which may be unmodified or modified, or an unconventional moiety;
wherein each of (N)x and (N′)y is an oligonucleotide in which each consecutive N or N′ is joined to the next N or N′ by a covalent bond;
wherein Z and Z′ may be present or absent, but if present is independently 1-5 consecutive nucleotides covalently attached at the 3′ terminus of the strand in which it is present;
wherein z″ may be present or absent, but if present is a capping moiety covalently attached at the 5′ terminus of (N′)y;
wherein x=18 to 27;
wherein y=18 to 27;
wherein (N)x comprises modified and unmodified ribonucleotides, each modified ribonucleotide having a 2′-O-methyl on its sugar, wherein N at the 3′ terminus of (N)x is a modified ribonucleotide, (N)x comprises at least five alternating modified ribonucleotides beginning at the 3′ end and at least nine modified ribonucleotides in total and each remaining N is an unmodified ribonucleotide;
wherein in (N′)y at least one unconventional moiety is present, which unconventional moiety may be an abasic ribose moiety, an abasic deoxyribose moiety, a modified or unmodified deoxyribonucleotide, a mirror nucleotide, and a nucleotide joined to an adjacent nucleotide by a 2′-5′ internucleotide phosphate bond; and
wherein the sequence of (N)x is substantially complementary to the sequence of (N′)y; and the sequence of (N′)y is substantially identical to the sequence of an mRNA encoded by the RTP801L gene.

[0271] In some embodiments x=y=19. In other embodiments x=y=23. In some embodiments the at least one unconventional moiety is present at positions 15, 16, 17, or 18 in (N′)y. In some embodiments the unconventional moiety is selected from a mirror nucleotide, an abasic ribose moiety and an abasic deoxyribose moiety. In some preferred embodiments the unconventional moiety is a mirror nucleotide, preferably an L-DNA moiety. In some embodiments an L-DNA moiety is present at position 17, position 18 or positions 17 and 18.

[0272] In other embodiments the unconventional moiety is an abasic moiety. In various embodiments (N′)y comprises at least five abasic ribose moieties or abasic deoxyribose moieties.

[0273] In yet other embodiments (N′)y comprises at least five abasic ribose moieties or abasic deoxyribose moieties and at least one of N′ is an LNA.

[0274] In some embodiments of Structure (IX) (N)x comprises nine alternating modified ribonucleotides. In other embodiments of Structure (I) (N)x comprises nine alternating modified ribonucleotides further comprising a 2′O modified nucleotide at position 2. In some embodiments (N)x comprises 2′O Me modified ribonucleotides at the odd numbered positions 1, 3, 5, 7, 9, 11, 13, 15, 17, 19. In other embodiments (N)x further comprises a 2′O Me modified ribonucleotide at one or both of positions 2 and 18. In yet other embodiments (N)x comprises 2′O Me modified ribonucleotides at positions 2, 4, 6, 8, 11, 13, 15, 17, 19.

[0275] In various embodiments z″ is present and is selected from an abasic ribose moiety, a deoxyribose moiety; an inverted abasic ribose moiety, a deoxyribose moiety; C6-amino-Pi; a mirror nucleotide.

[0276] In another aspect the present invention provides a compound having Structure (J) set forth below:

| | | |
|---|---|---|
| (J) | 5′ (N)x-Z 3′ | (antisense strand) |
| | 3′ Z′-(N′)y-z″ 5′ | (sense strand) |

wherein each of N and N′ is a ribonucleotide which may be unmodified or modified, or an unconventional moiety;
wherein each of (N)x and (N′)y is an oligonucleotide in which each consecutive N or N′ is joined to the next N or N′ by a covalent bond;
wherein Z and Z′ may be present or absent, but if present is independently 1-5 consecutive nucleotides covalently attached at the 3′ terminus of the strand in which it is present;
wherein z″ may be present or absent but if present is a capping moiety covalently attached at the 5′ terminus of (N′)y;
wherein x=18 to 27;
wherein y=18 to 27;
wherein (N)x comprises modified or unmodified ribonucleotides, and optionally at least one unconventional moiety;
wherein in (N′)y at least one unconventional moiety is present, which unconventional moiety may be an abasic ribose moiety, an abasic deoxyribose moiety, a modified or unmodified deoxyribonucleotide, a mirror nucleotide, a non-base pairing nucleotide analog or a nucleotide joined to an adjacent nucleotide by a 2′-5′ internucleotide phosphate bond; and
wherein the sequence of (N)x is substantially complementary to the sequence of (N′)y; and the sequence of (N′)y is substantially identical to the sequence of an mRNA encoded by the RTP801L gene.

[0277] In some embodiments x=y=19. In other embodiments x=y=23. In some preferred embodiments (N)x comprises modified and unmodified ribonucleotides, and at least one unconventional moiety.

[0278] In some embodiments in (N)x the N at the 3′ terminus is a modified ribonucleotide and (N)x comprises at least 8 modified ribonucleotides. In other embodiments at least 5 of the at least 8 modified ribonucleotides are alternating beginning at the 3′ end. In some embodiments (N)x comprises an abasic moiety in one of positions 5, 6, 7, 8, 9, 10, 11, 12, 13, 14 or 15.

[0279] In some embodiments the at least one unconventional moiety in (N′)y is present at positions 15, 16, 17, or 18. In some embodiments the unconventional moiety is selected from a mirror nucleotide, an abasic ribose moiety and an abasic deoxyribose moiety. In some preferred embodiments the unconventional moiety is a mirror nucleotide, preferably an L-DNA moiety. In some embodiments an L-DNA moiety is present at position 17, position 18 or positions 17 and 18. In other embodiments the at least one unconventional moiety in (N′)y is an abasic ribose moiety or an abasic deoxyribose moiety.

[0280] In various embodiments of Structure (X) z″ is present and is selected from an abasic ribose moiety, a deoxyribose moiety; an inverted abasic ribose moiety, a deoxyribose moiety; C6-amino-Pi; a mirror nucleotide.

[0281] In yet another aspect the present invention provides a compound having Structure (K) set forth below:

| | | |
|---|---|---|
| (K) | 5′ (N)ₓ-Z 3′ | (antisense strand) |
| | 3′ Z′-(N′)_{y}-z″ 5′ | (sense strand) |

wherein each of N and N′ is a ribonucleotide which may be unmodified or modified, or an unconventional moiety;
wherein each of (N)x and (N′)y is an oligonucleotide in which each consecutive N or N′ is joined to the next N or N′ by a covalent bond;
wherein Z and Z′ may be present or absent, but if present is independently 1-5 consecutive nucleotides covalently attached at the 3′ terminus of the strand in which it is present;
wherein z″ may be present or absent but if present is a capping moiety covalently attached at the 5′ terminus of (N′)y;
wherein x=18 to 27;
wherein y=18 to 27;
wherein (N)x comprises a combination of modified or unmodified ribonucleotides and unconventional moieties, any modified ribonucleotide having a 2′-O-methyl on its sugar;
wherein (N′)y comprises modified or unmodified ribonucleotides and optionally an unconventional moiety, any modified ribonucleotide having a 2′OMe on its sugar;
wherein the sequence of (N)x is substantially complementary to the sequence of (N′)y; and the sequence of (N′)y is substantially identical to the sequence of an mRNA encoded by the RTP801L gene; and wherein there are less than 15 consecutive nucleotides complementary to the mRNA.

[0282] In some embodiments x=y=19. In other embodiments x=y=23. In some preferred embodiments the at least one preferred one unconventional moiety is present in (N)x and is an abasic ribose moiety or an abasic deoxyribose moiety. In other embodiments the at least one unconventional moiety is present in (N)x and is a non-base pairing nucleotide analog. In various embodiments (N′)y comprises unmodified ribonucleotides. In some embodiments (N)x comprises at least five abasic ribose moieties or abasic deoxyribose moieties or a combination thereof. In certain embodiments (N)x and/or (N′)y comprise modified ribonucleotides which do not base pair with corresponding modified or unmodified ribonucleotides in (N′)y and/or (N)x.

[0283] In various embodiments the present invention provides an siRNA set forth in Structure (L):

| | | |
|---|---|---|
| (L) | 5′ (N)ₓ-Z 3′ | (antisense strand) |
| | 3′ Z′-(N′)_{y} 5′ | (sense strand) |

wherein each of N and N′ is a nucleotide selected from an unmodified ribonucleotide, a modified ribonucleotide, an unmodified deoxyribonucleotide and a modified deoxyribonucleotide;
wherein each of (N)ₓ and (N′)_{y} is an oligonucleotide in which each consecutive N or N′ is joined to the next N or N′ by a covalent bond;
wherein Z and Z′ are absent;
wherein x=y=19;
wherein in (N′)y the nucleotide in at least one of positions 15, 16, 17, 18 and 19 comprises a nucleotide selected from an abasic pseudo-nucleotide, a mirror nucleotide, a deoxyribonucleotide and a nucleotide joined to an adjacent nucleotide by a 2′-5′ internucleotide bond;
wherein (N)x comprises alternating modified ribonucleotides and unmodified ribonucleotides each modified ribonucleotide being modified so as to have a 2′-O-methyl on its sugar and the ribonucleotide located at the middle position of (N)x being modified or unmodified, preferably unmodified; and
wherein the sequence of (N)x is substantially complementary to the sequence of (N′)y; and the sequence of (N′)y is substantially identical to the mRNA of the RTP801L gene.

[0284] In some embodiments of Structure (L), in (N′)y the nucleotide in one or both of positions 17 and 18 comprises a modified nucleotide selected from an abasic pseudo-nucleotide, a mirror nucleotide and a nucleotide joined to an adjacent nucleotide by a 2′-5′ internucleotide bond. In some embodiments the mirror nucleotide is selected from L-DNA and L-RNA. In various embodiments the mirror nucleotide is L-DNA.

[0285] In various embodiments (N′)y comprises a modified nucleotide at position 15 wherein the modified nucleotide is selected from a mirror nucleotide and a deoxyribonucleotide.

[0286] In certain embodiments (N′)y further comprises a modified nucleotide or pseudo nucleotide at position 2 wherein the pseudo nucleotide may be an abasic pseudo-nucleotide analog and the modified nucleotide is optionally a mirror nucleotide.

[0287] In various embodiments the antisense strand (N)x comprises 2′O-Me modified ribonucleotides at the odd numbered positions (5′ to 3′; positions 1, 3, 5, 7, 9, 11, 13, 15, 17, 19). In some embodiments (N)x further comprises 2′O-Me modified ribonucleotides at one or both positions 2 and 18. In other embodiments (N)x comprises 2′O Me modified ribonucleotides at positions 2, 4, 6, 8, 11, 13, 15, 17, 19.

[0288] Other embodiments of Structures (L), (I) and (J) are envisaged wherein x=y=21 or

wherein x=y=23; in these embodiments the modifications for (N′)y discussed above instead of being in positions 17 and 18 are in positions 19 and 20 for 21-mer oligonucleotide and 21 and 22 for 23 mer oligonucleotide; similarly the modifications in positions 15, 16, 17, 18 or 19 are in positions 17, 18, 19, 20 or 21 for the 21-mer oligonucleotide and positions 19, 20, 21, 22, or 23 for the 23-mer oligonucleotide. The 2′O Me modifications on the antisense strand are similarly adjusted. In some embodiments (N)x comprises 2′O Me modified ribonucleotides at the odd numbered positions (5′ to 3′; positions 1, 3, 5, 7, 9, 12, 14, 16, 18, 20 for the 21 mer oligonucleotide [nucleotide at position 11 unmodified] and 1, 3, 5, 7, 9, 11, 13, 15, 17, 19, 21, 23 for the 23 mer oligonucleotide [nucleotide at position 12 unmodified]. In other embodiments (N)ₓ comprises 2′O Me modified ribonucleotides at positions 2, 4, 6, 8, 10, 12, 14, 16, 18, 20 [nucleotide at position 11 unmodified] for the 21 mer oligonucleotide and at positions 2, 4, 6, 8, 10, 13, 15, 17, 19, 21, 23 for the 23 mer oligonucleotide [nucleotide at position 12 unmodified].

[0289] In some embodiments (N′)y further comprises a 5′ terminal cap nucleotide. In various embodiments the terminal cap moiety is selected from an abasic pseudo-nucleotide analog, an inverted abasic pseudo-nucleotide analog, an L-DNA nucleotide, and a C6-imine phosphate (C6 amino linker with phosphate at terminus).

[0290] In other embodiments the present invention provides a compound having Structure (M) set forth below:

| | |
|---|---|
| 5′ (N)ₓ-Z 3′ | (antisense strand) |
| 3′ Z′-(N′)_{y} 5′ | (sense strand) |

wherein each of N and N′ is selected from a pseudo-nucleotide and a nucleotide;
wherein each nucleotide is selected from an unmodified ribonucleotide, a modified ribonucleotide, an unmodified deoxyribonucleotide and a modified deoxyribonucleotide;
wherein each of (N)ₓ and (N′)_{y} is an oligonucleotide in which each consecutive N or N′ is joined to the next N or N′ by a covalent bond;
wherein Z and Z′ are absent;
wherein x=18 to 27;
wherein y=18 to 27;
wherein the sequence of (N)x is substantially complementary to the sequence of (N′)y; and the sequence of (N′)y is substantially identical to an mRNA of the RTP801L gene;
wherein at least one of N is selected from an abasic pseudo nucleotide, a non-pairing nucleotide analog and a nucleotide mismatch to the mRNA of the RTP801L gene in a position of (N)x such that (N)x comprises less than 15 consecutive nucleotides complementary to the mRNA of the RTP801L gene.

[0291] In other embodiments the present invention provides a double stranded compound having Structure (N) set forth below:

| | | |
|---|---|---|
| (N) | 5′ (N)ₓ-Z 3′ | (antisense strand) |
| | 3′ Z′-(N′)_{y} 5′ | (sense strand) |

wherein each of N and N′ is a nucleotide selected from an unmodified ribonucleotide, a modified ribonucleotide, an unmodified deoxyribonucleotide and a modified deoxyribonucleotide;
wherein each of (N)ₓ and (N′)_{y} is an oligonucleotide in which each consecutive N or N′ is joined to the next N or N′ by a covalent bond;
wherein Z and Z′ are absent;
wherein each of x and y is an integer between 18 and 40;
wherein the sequence of (N)x is substantially complementary to the sequence of (N′)y; and the sequence of (N′)y is substantially identical to an mRNA of the RTP801L gene;
wherein (N)x, (N′)y or (N)x and (N′)y comprise non base-pairing modified nucleotides such that (N)x and (N′)y form less than 15 base pairs in the double stranded compound.

[0292] In other embodiments the present invention provides a compound having Structure (O) set forth below:

| | | |
|---|---|---|
| (O) | 5′ (N)ₓ-Z 3′ | (antisense strand) |
| | 3′ Z′-(N′)_{y} 5′ | (sense strand) |

wherein each of N is a nucleotide selected from an unmodified ribonucleotide, a modified ribonucleotide, an unmodified deoxyribonucleotide and a modified deoxyribonucleotide;
wherein each of N′ is a nucleotide analog selected from a six membered sugar nucleotide, seven membered sugar nucleotide, morpholino moiety, peptide nucleic acid and combinations thereof;
wherein each of (N)x and (N′)y is an oligonucleotide in which each consecutive N or N′ is joined to the next N or N′ by a covalent bond;
wherein Z and Z′ are absent;
wherein each of x and y is an integer between 18 and 40;
wherein the sequence of (N)x is substantially complementary to the sequence of (N′)y; and the sequence of (N′)y is substantially identical to an mRNA of the RTP801L gene.

[0293] In other embodiments the present invention provides a compound having Structure (P) set forth below:

| | | |
|---|---|---|
| (P) | 5′ (N)ₓ-Z 3′ | (antisense strand) |
| | 3′ Z′-(N′)_{y} 5′ | (sense strand) |

wherein each of N and N′ is a nucleotide selected from an unmodified ribonucleotide, a modified ribonucleotide, an unmodified deoxyribonucleotide and a modified deoxyribonucleotide;
wherein each of (N)x and (N′)y is an oligonucleotide in which each consecutive N or N′ is joined to the next N or N′ by a covalent bond;
wherein Z and Z′ are absent;
wherein each of x and y is an integer between 18 and 40;
wherein one of N or N′ in an internal position of (N)x or (N′)y or one or more of N or N′ at a terminal position of (N)x or (N′)y comprises an abasic moiety or a 2′ modified nucleotide;
wherein the sequence of (N)x is substantially complementary to the sequence of (N′)y; and the sequence of (N′)y is substantially identical to an mRNA of the RTP801L gene.

[0294] In various embodiments (N′)y comprises a modified nucleotide at position 15 wherein the modified nucleotide is selected from a mirror nucleotide and a deoxyribonucleotide.

[0295] In certain embodiments (N′)y further comprises a modified nucleotide at position 2 wherein the modified nucleotide is selected from a mirror nucleotide and an abasic pseudo-nucleotide analog.

[0296] In various embodiments the antisense strand (N)x comprises 2′O-Me modified ribonucleotides at the odd numbered positions (5′ to 3′; positions 1, 3, 5, 7, 9, 11, 13, 15, 17, 19). In some embodiments (N)x further comprises 2′O-Me modified ribonucleotides at one or both positions 2 and 18. In other embodiments (N)x comprises 2′O Me modified ribonucleotides at positions 2, 4, 6, 8, 11, 13, 15, 17, 19.

[0297] The Structural motifs described above are useful with any oligonucleotide pair (sense and antisense strands) to a mammalian RTP801L gene, and preferably to the human RTP801L gene.

[0298] Any siRNA sequence disclosed herein can be prepared having any of the modifications/structures disclosed herein.

[0299] In another aspect the present invention provides a pharmaceutical composition comprising a modified or unmodified compound of the present invention, in an amount effective to inhibit human RTP801L gene expression wherein the compound comprises an antisense sequence, (N)ₓ; and a pharmaceutically acceptable carrier.

[0300] In yet another aspect the present invention provides a pharmaceutical composition comprising one or more modified compounds of the present invention, in an amount effective to inhibit human RTP801L gene expression wherein the compound comprises an antisense sequence, (N)ₓ; and a pharmaceutically acceptable carrier.

[0301] In another aspect, the present invention relates to a method for the treatment of a subject in need of treatment for a disease or disorder or symptoms associated with the disease or disorder, associated with the expression of the RTP801L gene comprising administering to the subject an amount of an siRNA, according to the present invention, in a therapeutically effective dose so as to thereby treat the subject.

[0302] The methods of the invention comprise administering to the subject one or more siRNA compounds which inhibit expression of the RTP801L gene. The novel structures disclosed herein, when integrated into antisense and corresponding sense nucleic acid sequences, provide siRNA compounds useful in reducing expression of the RTP801L gene.

### Pharmaceutical Compositions

[0303] The present invention provides a pharmaceutical composition comprising one or more of the compounds of the invention; and a pharmaceutically acceptable carrier. Such compositions may comprise a mixture of two or more different oligonucleotides/siRNAs.

[0304] The invention further provides a pharmaceutical composition comprising at least one compound of the invention covalently or non-covalently bound to one or more compounds of the invention in an amount effective to inhibit RTP801L; and a pharmaceutically acceptable carrier. Endogenous cellular complexes to produce one or more oligoribonucleotides of the invention may process the compound intracellularly.

[0305] The present invention also provides for a process of preparing a pharmaceutical composition, which comprises:

providing one or more siRNA compounds of the invention; and
admixing said compound with a pharmaceutically acceptable carrier.

[0306] Substantially complementary refers to complementarity of greater than about 84%, to another sequence. For example in a duplex region consisting of 19 base pairs one mismatch results in 94.7% complementarity, two mismatches results in about 89.5% complementarity and 3 mismatches results in about 84.2% complementarity, rendering the duplex region substantially complementary. Accordingly substantially identical refers to identity of greater than about 84%, to another sequence.

[0307] Additionally, the invention provides a method of inhibiting the expression of the genes of the present invention by at least 50% as compared to a control comprising contacting an mRNA transcript of the gene of the present invention with one or more of the compounds of the invention.

[0308] In one embodiment the oligoribonucleotide is inhibiting the RTP801L gene, whereby the inhibition is selected from the group comprising inhibition of gene function, inhibition of polypeptide and inhibition of mRNA expression.

[0309] In one embodiment the compound is inhibiting expression of a polypeptide, whereby the inhibition is selected from the group comprising inhibition of function (which may be examined by an enzymatic assay or a binding assay with a known interactor of the native gene/polypeptide, inter alia), inhibition of protein (which may be examined by Western blotting, ELISA or immuno-precipitation, inter alia) and inhibition of mRNA expression (which may be examined by Northern blotting, quantitative RT-PCR, in-situ hybridisation or microarray hybridisation, inter alia).

[0310] In additional embodiments the invention provides a method of treating a subject suffering from a disease accompanied by an elevated level of the RTP801L gene/polypeptide, the method comprising administering to the subject a compound of the invention in a therapeutically effective dose thereby treating the subject.

[0311] More particularly, the invention provides a chemically modified double stranded oligoribonucleotide wherein one strand comprises consecutive nucleotides having, from 5′ to 3′, the sequence set forth in any one of Tables A-G or a homolog thereof wherein in up to two of the ribonucleotides in each terminal region is altered.

[0312] Additionally, further nucleic acids according to the present invention comprise at least 14 contiguous nucleotides of any one of the oligomers set forth in any one of Tables A-G and more preferably 14 contiguous nucleotide base pairs at any end of the double-stranded structure comprised of the first strand and second strand as described above.

### Delivery

[0313] The siRNA molecules of the present invention may be delivered to the target tissue by direct application of the naked molecules prepared with a carrier or a diluent.

[0314] The term “naked siRNA” refers to siRNA molecules that are free from any delivery vehicle that acts to assist, promote or facilitate entry into the cell, including viral sequences, viral particles, liposome formulations, lipofectin or precipitating agents and the like. For example, siRNA in PBS is “naked siRNA”.

[0315] However, in some embodiments the siRNA molecules of the invention are delivered in liposome formulations and lipofectin formulations and the like and can be prepared by methods well known to those skilled in the art. Such methods are described, for example, in U.S. Pat. Nos. 5,593,972, 5,589,466, and 5,580,859, which are herein incorporated by reference.

[0316] Delivery systems aimed specifically at the enhanced and improved delivery of siRNA into mammalian cells have been developed, (see, for example, Shen et al FEBS Let. 2003, 539:111-114; Xia et al., Nat. Biotech. 2002, 20:1006-1010; Reich et al., Mol. Vision. 2003, 9: 210-216; Sørensen et al., J. Mol. Biol. 2003. 327: 761-766; Lewis et al., Nat. Gen. 2002, 32: 107-108 and Simeoni et al., NAR 2003, 31, 11:2717-2724).

[0317] The pharmaceutically acceptable carriers, solvents, diluents, excipients, adjuvants and vehicles as well as implant carriers generally refer to inert, non-toxic solid or liquid fillers, diluents or encapsulating material not reacting with the active ingredients of the invention and they include liposomes and microspheres. Examples of delivery systems useful in the present invention include U.S. Pat. Nos. 5,225,182; 5,169,383; 5,167,616; 4,959,217; 4,925,678; 4,487,603; 4,486,194; 4,447,233; 4,447,224; 4,439,196; and 4,475,196. Many other such implants, delivery systems, and modules are well known to those skilled in the art. In one specific embodiment of this invention topical and transdermal formulations may be selected. The siRNAs or pharmaceutical compositions of the present invention are administered and dosed in accordance with good medical practice, taking into account the clinical condition of the individual patient, the disease to be treated, the site and method of administration, scheduling of administration, patient age, sex, body weight and other factors known to medical practitioners.

[0318] The “therapeutically effective dose” for purposes herein is thus determined by such considerations as are known in the art. The dose must be effective to achieve improvement including but not limited to improved survival rate or more rapid recovery, or improvement or elimination of symptoms and other indicators as are selected as appropriate measures by those skilled in the art.

[0319] In general, the active dose of compound for humans is in the range of from 1 ng/kg to about 20-100 mg/kg body weight per day, preferably about 0.01 mg to about 2-10 mg/kg body weight per day, in a regimen of one dose per day or twice or three or more times per day for a period of 1-4 weeks or longer.

[0320] The compounds of the present invention can be administered by any of the conventional routes of administration. It should be noted that the compound can be administered as the compound or as pharmaceutically acceptable salt and can be administered alone or as an active ingredient in combination with pharmaceutically acceptable carriers, solvents, diluents, excipients, adjuvants and vehicles. The compounds can be administered orally, subcutaneously or parenterally including intravenous, intraarterial, intramuscular, intraperitoneally, and intranasal, inhalation, transtympanic administration as well as intrathecal and infusion techniques. Implants of the compounds are also useful. Liquid forms may be prepared for injection, the term including subcutaneous, transdermal, intravenous, intramuscular, intrathecal, and other parental routes of administration. The liquid compositions include aqueous solutions, with and without organic co-solvents, aqueous or oil suspensions, emulsions with edible oils, as well as similar pharmaceutical vehicles. In a particular embodiment, the administration comprises intravenous administration. In another embodiment the administration comprises topical or local administration.

[0321] In addition, in certain embodiments the compositions for use in the novel treatments of the present invention may be formed as aerosols, for example for intranasal administration.

[0322] In certain embodiments, oral compositions (such as tablets, suspensions, solutions) may be effective for local delivery to the oral cavity such as oral composition suitable for mouthwash for the treatment of oral mucositis.

[0323] The compounds of the present invention can be administered topically to the surface of the eye. It should be noted that the compound is preferably administered as the compound or as pharmaceutically acceptable salt active ingredient in combination with pharmaceutically acceptable carriers, solvents, diluents, excipients, adjuvants and or vehicles. According to the present invention the preferred method of delivery is topical administration for topical delivery to the eye.

[0324] Liquid forms are prepared for drops or spray. The liquid compositions include aqueous solutions, with and without organic co-solvents, aqueous or oil suspensions, emulsions with oils, as well as similar pharmaceutical vehicles. In some embodiments administration comprises topical or local administration.

[0325] These compounds are administered to humans and other animals for therapy by any suitable route of administration to the eye, as by, for example, a spray or drops, and topically, as by ointments, suspensions or drops.

[0326] In preferred embodiments the subject being treated is a warm-blooded animal and, in particular, mammals including human.

### Methods of Treatment

[0327] In one aspect, the present invention relates to a method for the treatment of a subject in need of treatment for a disease or disorder associated with expression of the RTP801L gene, comprising administering to the subject an amount of at least one chemically modified siRNA which inhibits expression of RTP801L. In certain preferred embodiments more than one siRNA compound is administered.

[0328] In preferred embodiments the subject being treated is a warm-blooded animal and, in particular, mammals including human.

[0329] The methods of the invention comprise administering to the subject one or more RTP801L siRNA compounds which down-regulate expression of the RTP801L gene; and in particular at least one siRNA in a therapeutically effective dose so as to thereby treat the subject.

[0330] The term “treatment” refers to both therapeutic treatment and prophylactic or preventative measures, wherein the object is to prevent or slow down, attenuate the related disorder as listed above. Those in need of treatment include those already experiencing the disease or condition, those prone to having the disease or condition, and those in which the disease or condition is to be prevented. The compounds of the invention may be administered before, during or subsequent to the onset of the disease or condition or symptoms associated therewith. In cases where treatment is for the purpose of prevention, then the present invention relates to a method for delaying the onset of or averting the development of the disease or disorder.

[0331] In general, the method includes administering oligoribonucleotides, such as small interfering RNAs (i.e., siRNAs) that are targeted to a particular mRNA and hybridize to it, or nucleic acid material that can produce siRNAs in a cell, in an amount sufficient to down-regulate expression of a target gene by an RNA interference mechanism. In particular, the subject method can be used to inhibit expression of the RTP801L gene for treatment of respiratory disorders, microvascular disorders, eye disorders and hearing impairments.

[0332] Thus, in one embodiment the present invention provides for a method of treating a patient suffering from a microvascular disorder, an eye disease a respiratory disorder, a hearing disorder or a spinal cord injury or other wound, comprising administering to the patient a pharmaceutical composition comprising an RTP801L inhibitor in a therapeutically effective amount so as to thereby treat the patient. The invention further provides a method of treating a patient suffering from a microvascular disorder, an eye disease, a respiratory disorder, a hearing disorder or a spinal cord injury or other wound, or an ischemic disease, comprising administering to the patient a pharmaceutical composition comprising an RTP801L inhibitor, in a dosage and over a period of time sufficient to promote recovery. The eye disease may be macular degeneration such as age-related macular degeneration (AMD), or glaucoma, inter alia. The microvascular disorder may be diabetic retinopathy or acute renal failure, inter alia. The respiratory disorder may be chronic obstructive pulmonary disease (COPD), acute lung injury (ALI), Acute Respiratory Distress Syndrome (ARDS), Lung transplantation, emphysema, chronic bronchitis, asthma and lung cancer, inter alia. The hearing disorder may be trauma-induced deafness, age-related deafness or cisplatin-induced deafness, inter alia. Thus, a list of conditions to be treated includes ARF, hearing loss, Acute Respiratory Distress Syndrome, Glaucoma, AMD, COPD, nephrotoxicity, lung transplantation, and Ischemia/reperfusion injury. Oligonucleotide sequences of RTP801L siRNA inhibitors are set forth below and in any one of Tables A-G (SEQ ID NOs:2-6927).

[0333] The present invention further relates to the use of any of the compounds disclosed herein, particularly to novel small interfering RNAs (siRNAs), in the treatment of diseases and disorders associated with RTP801L expression.

[0334] A further end modification is a biotin group. Such biotin group may preferably be attached to either the most 5′ or the most 3′ nucleotide of the first and/or second strand or to both ends. In a more preferred embodiment the biotin group is coupled to a polypeptide or a protein. It is also within the scope of the present invention that the polypeptide or protein is attached through any of the other aforementioned end modifications.

[0335] The various end modifications as disclosed herein are preferably located at the ribose moiety of a nucleotide of the nucleic acid according to the present invention. More particularly, the end modification may be attached to or replace any of the OH-groups of the ribose moiety, including but not limited to the 2′OH, 3′OH and 5′OH position, provided that the nucleotide thus modified is a terminal nucleotide. Inverted abasic or abasic are nucleotides, either deoxyribonucleotides or ribonucleotides which do not have a nucleobase moiety. This kind of compound is, inter alia, described in Sternberger, M., et al., (2002. Antisense Nucleic Acid Drug Dev, 12, 131-43).

[0336] A further form of nucleotides used may be siNA which is, among others, described in international patent application WO 03/070918.

[0337] It is to be understood that, in the context of the present invention, any of the siRNA molecules disclosed herein, or any long double-stranded RNA molecules (typically 25-500 nucleotides in length) which are processed by endogenous cellular complexes (such as DICER—see above) to form the siRNA molecules disclosed herein, or molecules which comprise the siRNA molecules disclosed herein, can be incorporated into the molecules of the present invention to form additional novel molecules, and can employed in the treatment of the diseases or disorders described herein.

[0338] In particular, it is envisaged that a long oligonucleotide (typically about 80-500 nucleotides in length) comprising one or more stem and loop structures, where stem regions comprise the oligonucleotides of the invention, may be delivered in a carrier, preferably a pharmaceutically acceptable carrier, and may be processed intracellularly by endogenous cellular complexes (e.g. by DROSHA and DICER as described above) to produce one or more smaller double stranded oligonucleotides (siRNAs) which are oligonucleotides of the invention. This oligonucleotide can be termed a tandem shRNA construct. It is envisaged that this long oligonucleotide is a single stranded oligonucleotide comprising one or more stem and loop structures, wherein each stem region comprises a sense and corresponding antisense siRNA sequence. Any molecules, such as, for example, antisense DNA molecules which comprise the inhibitory sequences disclosed herein (with the appropriate nucleic acid modifications) are particularly desirable and may be used in the same capacity as their corresponding RNAs/siRNAs for all uses and methods disclosed herein.

[0339] In addition, analogs of polynucleotides can be prepared wherein the structure of the nucleotide is fundamentally altered and that are better suited as therapeutic or experimental reagents. An example of a nucleotide analog is a peptide nucleic acid (PNA) wherein the deoxyribose (or ribose) phosphate backbone in DNA (or RNA is replaced with a polyamide backbone which is similar to that found in peptides. PNA analogs have been shown to be resistant to degradation by enzymes and to extend lives in vivo and in vitro. Further, PNAs have been shown to bind stronger to a complementary DNA sequence than a DNA molecule. This observation is attributed to the lack of charge repulsion between the PNA strand and the DNA strand. Other modifications that can be made to oligonucleotides include polymer backbones, cyclic backbones, or acyclic backbones.

[0340] In a particularly preferred embodiment the compounds of the present invention possess a sequence present in Table F (SEQ ID NOS: 6896-6927). In other preferred embodiments the RTP801L compound is selected from any one of the compounds set forth in Table G.

[0341] In one preferred embodiment the siRNA used in the methods of the present invention is one of a pair of oligonucleotides set forth in Table F. In another preferred embodiment the siRNA compound is selected from a compound set forth in Table G.

[0342] Thus, in a particularly preferred embodiment, the present invention comprises a compound having an oligonucleotide sequence and chemical modifications as shown in FIG. 8. In some preferred embodiments the compound is ID 128339 x=y=19; wherein (N)x comprises alternating unmodified and 2′OMe sugar modified ribonucleotides and wherein (N′)y comprises unmodified ribonucleotides and an L-deoxyribonucleotide at position 18 and an optional deoxyribonucleotide at position 15. siRNA compound 128339 exhibits good activity (knockdown of about 75% at 20 nM) in human cells and stability in human serum.

[0343] And a compound having the structure

[chemical structure]

wherein in (N)x the ribonucleotides alternate between modified ribonucleotides and unmodified ribonucleotides each modified ribonucleotide being modified so as to have a 2′-O-methyl on its sugar and the ribonucleotide located at the middle position being unmodified;
wherein in (N′)y the nucleotide at position 18 or 17 and 18 is a mirror nucleotide and the nucleotide at position 15 is optionally an unmodified ribonucleotide or a deoxyribonucleotide;
and wherein the antisense and the sense strands are unphosphorylated or phosphorylated at the 3′ termini.

[0344] And a compound having the structure

[chemical structure]

wherein in (N)x the ribonucleotides alternate between modified ribonucleotides and unmodified ribonucleotides each modified ribonucleotide being modified so as to have a 2′-O-methyl on its sugar and the ribonucleotide located at the middle position being unmodified;
wherein in (N′)y the nucleotide at position 18 or 17 and 18 is a mirror nucleotide and the nucleotide at position 15 is optionally an unmodified ribonucleotide or a deoxyribonucleotide;
and wherein the antisense and the sense strands are unphosphorylated or phosphorylated at the 3′ termini.

[0345] And a compound having the structure

[chemical structure]

wherein in (N)x the ribonucleotides alternate between modified ribonucleotides and unmodified ribonucleotides each modified ribonucleotide being modified so as to have a 2′-O-methyl on its sugar and the ribonucleotide located at the middle position being unmodified;
wherein in (N′)y the nucleotide at position 18 or 17 and 18 is a mirror nucleotide and the nucleotide at position 15 is optionally an unmodified ribonucleotide or a deoxyribonucleotide;
and wherein the antisense and the sense strands are unphosphorylated or phosphorylated at the 3′ termini.

[0346] And a compound having the structure

[chemical structure]

wherein in (N)x the ribonucleotides alternate between modified ribonucleotides and unmodified ribonucleotides each modified ribonucleotide being modified so as to have a 2′-O-methyl on its sugar and the ribonucleotide located at the middle position being unmodified;
wherein in (N′)y the nucleotide at position 18 or 17 and 18 is a mirror nucleotide and the nucleotide at position 15 is optionally an unmodified ribonucleotide or a deoxyribonucleotide;
and wherein the antisense and the sense strands are unphosphorylated or phosphorylated at the 3′ termini.

[0347] Further, the present invention provides for a pharmaceutical composition comprising any one of the above compounds and a pharmaceutically acceptable excipient.

[0348] The siRNA molecules having antisense strand SEQ ID NO:999 and sense strand SEQ ID NO:74 or antisense strand SEQ ID NO:1000 and sense strand SEQ ID NO:75 or antisense strand SEQ ID NO:6914 and sense strand SEQ ID NO:6898 or antisense strand SEQ ID NO:6915 and sense strand SEQ ID NO:6899 comprise any of the additional modifications disclosed herein, and are used in the treatment of any of the indications disclosed herein, such as the following diseases or conditions: hearing loss, acute renal failure (ARF), glaucoma, acute respiratory distress syndrome (ARDS) and other acute lung and respiratory injuries, ischemia-reperfusion injury following lung transplantation, organ transplantation including lung, liver, heart, bone marrow, pancreas, cornea and kidney transplantation, spinal cord injury, pressure sores, age-related macular degeneration (AMD), dry eye syndrome, oral mucositis and chronic obstructive pulmonary disease (COPD). Other indications include cancer of all types, chemical-induced nephrotoxicity and chemical-induced neurotoxicity, for example toxicity induced by cisplatin and cisplatin-like compounds, by aminoglycosides, by loop diuretics, and by hydroquinone and their analogs.

[0349] These compounds and pharmaceuticals are used to treat a patient suffering from any one of the diseases or conditions disclosed herein; further, any of the siRNAs in any one of Tables A-G are used in the same manner.

[0350] Additionally, the invention provides a method of down-regulating the expression of the RTP801L gene by at least 50% as compared to a control comprising contacting an mRNA transcript of the RTP801L gene with one or more of the compounds of the invention.

[0351] In one embodiment the oligoribonucleotide is down-regulating the RTP801L gene, whereby the down-regulation is selected from the group comprising down-regulation of gene function, down-regulation of polypeptide and down-regulation of mRNA expression.

[0352] In one embodiment the compound is down-regulating the RTP801L polypeptide, whereby the down-regulation is selected from the group comprising down-regulation of function (which may be examined by an enzymatic assay or a binding assay with a known interactor of the native gene/polypeptide, inter alia), down-regulation of protein (which may be examined by Western blotting, ELISA or immuno-precipitation, inter alia) and down-regulation of mRNA expression (which may be examined by Northern blotting, quantitative RT-PCR, in-situ hybridization or microarray hybridisation, inter alia).

[0353] In additional embodiments the invention provides a method of treating a patient suffering from a disease accompanied by an elevated level of RTP801L, the method comprising administering to the patient a compound of the invention in a therapeutically effective dose thereby treating the patient.

[0354] More particularly, the invention provides an oligoribonucleotide wherein one strand comprises consecutive nucleotides having, from 5′ to 3′, the sequence set forth in any one of Tables A-G, or a homolog thereof wherein in up to two of the ribonucleotides in each terminal region is altered.

[0355] The terminal region of the oligoribonucleotide refers to bases 1-4 and/or 16-19 in the 19-mer sequence and to bases 1-4 and/or 18-21 in the 21-mer sequence, and to bases 1-4 and/or 20-23 in the 23mer sequence.

[0356] When the nucleic acid according to the present invention is manufactured or expressed, preferably expressed in vivo, more preferably in a patient who is in need of the nucleic acid according to the present invention, such manufacture or expression preferably uses an expression vector, preferably a mammalian expression vector. Expression vectors are known in the art and preferably comprise plasmids, cosmids, viral expression systems. Preferred viral expression systems include, but are not limited to, adenovirus, retrovirus and lentivirus.

[0357] Methods are known in the art to introduce the vectors into cells or tissues. Such methods can be found generally described in Sambrook et al., Molecular cloning: A Laboratory Manual, Cold Springs Harbour Laboratory, New York (1983, 1992), or in Ausubel et al., Current Protocols in Molecular Biology, John Wiley and Sons, Baltimore, Md., 1998.

[0358] Suitable methods comprise, among others, transfection, lipofection, electroporation and infection with recombinant viral vectors. In connection with the present invention, an additional feature of the vector is in one embodiment an expression limiting feature such as a promoter and regulatory element, respectively, that are specific for the desired cell type thus allowing the expression of the nucleic acid sequence according to the present invention only once the background is provided which allows the desired expression.

[0359] In a further aspect the present invention is related to a pharmaceutical composition comprising a nucleic acid according to the present invention and/or a vector according to the present invention and, optionally, a pharmaceutically acceptable carrier, diluent or adjuvants or other vehicle(s). Preferably, such carrier, diluents, adjuvants and vehicles are inert, and non-toxic. The pharmaceutical composition is in its various embodiments adapted for administration in various ways. Such administration comprises systemic and local administration as well as oral, subcutaneous, parenteral, intravenous, intraarterial, intramuscular, intraperitonial, intranasal, and intrategral.

[0360] In particular embodiments the RTP801L siRNA is formulated as eye drops for administration to the surface of the eye. In other embodiments the RTP801L siRNA compound is administered to the lung by inhalation. In yet other embodiments the RTP801L siRNA compound is formulated for delivery to the inner ear by transtympanic injection or via ear drops.

[0361] It will be acknowledged by the one skilled in the art that the amount of the pharmaceutical composition and the respective siRNA depends on the clinical condition of the individual patient, the site and method of administration, scheduling of administration, patient age, sex, bodyweight and other factors known to medical practitioners. The pharmaceutically effective amount for purposes of prevention and/or treatment is thus determined by such considerations as are known in the medical arts. Preferably, the amount is effective to achieve improvement including but limited to improve the diseased condition or to provide for a more rapid recovery, improvement or elimination of symptoms and other indicators as are selected as appropriate measures by those skilled in the medical arts.

[0362] In a preferred embodiment, the pharmaceutical composition according to the present invention may comprise other pharmaceutically active compounds. Preferably, such other pharmaceutically active compounds are selected from the group comprising compounds which allow for uptake intracellular cell delivery, compounds which allow for endosomal release, compounds which allow for, longer circulation time and compounds which allow for targeting of endothelial cells or pathogenic cells. Preferred compounds for endosomal release are chloroquine, and inhibitors of ATP dependent H⁺ pumps.

[0363] The pharmaceutical composition is preferably formulated so as to provide for a single dosage administration or a multi-dosage administration.

[0364] The pharmaceutical composition according to the present invention can also be used in a method for preventing and/or treating a disease as disclosed herein, whereby the method comprises the administration of a nucleic acid according to the present invention, a vector according to the present invention or a pharmaceutical composition or medicament according to the present invention for any of the diseases described herein.

[0365] In a further aspect, the present invention is related to a method for designing or screening a nucleic acid which is suitable to down-regulate RTP801L, more particularly to down-regulate RTP801L function. This method comprises the use of a nucleic acid sequence as disclosed herein and the assessment of such nucleic acid in a suitable assay. Such assay is known in the art and, for example, described in the example part of this application. In a further step, a double-stranded nucleic acid is designed, preferably according to the design principles as laid down herein, which is suitable to down-regulate RTP801L, preferably in connection with a post transcriptional gene silencing mechanism such as RNA interference. Also the thus obtained, i.e. designed or screened, nucleic acid is assessed in the respective assay and the result, i.e. the effect of both the nucleic acid according to the present invention as well as the newly designed or screened nucleic acid in such assay compared. Preferably, the designed or screened nucleic acid is more suitable in case it is either more stable or more effective, preferably both. It will be acknowledged that the method will be particularly effective if any of the nucleic acids according to the present invention is used as a starting point. It is thus within the present invention that new nucleic acid molecules will be designed based on the principles disclosed herein, whereby the target sequence on the RTP801L mRNA will be slightly shifted relative to the target sequence on the RTP801L mRNA for the corresponding nucleic acid according to the present invention. Preferably the new nucleic acid will be shifted by at least one or more nucleotides relative to the stretch on the target mRNA in either the 5′ or the 3′ direction of the mRNA coding for RTP801L. It is however with in the present invention that the shift occurs in both directions simultaneously which means that the new nucleic acid incorporates the nucleic acid according to the present invention used as a starting point. It is also within the present invention that the elongation of the nucleic acid according to the present invention and used as a starting point is biased to either the 3′ end or the 5′ end. In case of such as bias either the 3′ end or the 5′ end of the new nucleic acid is longer, i.e more extended than the other end. When the new nucleic acid molecule is generated by extending either the 3′ end of the 5′ end of the antisense strand and/or the sense strand, the following sequence of steps is typically applied. If the shift is to the 5′ end of the mRNA of RTP801L, the 3′ end of the antisense strand has to be extended by the number of the nucleotides by which the 5′ end of the mRNA of RTP801L is shifted. The nucleotide(s) thus to be added to the 3′ end of the antisense strand of the new nucleic acid is/are complementary to those nucleotides following at the 5′ end of the target sequence on the RTP801L mRNA used for the nucleic acid molecule according to the present invention used as a starting point. The same has to be done to the sense strand. However the nucleotides to be added to the sense strand have to correspond, i.e. be complementary to the nucleotides newly added to the 3′ end of the antisense strand which means that they have to be added to the 5′ end of the sense strand. The latter step on the sense strand, however has to be done only to the extent that apart from the antisense strand also the sense strand shall be shifted, which is the case in preferred embodiments of the present invention. Although this shifting can be done to an extent defined by the ones skilled in the art, more preferably the shift shall be done such that also the new nucleic acid still contains a strech of at least 14 nucleotides, preferably 14 contiguous nucleotides as exhibited by any of the nucleic acid molecules disclosed herein.

[0366] The synthesis of any of the nucleic acids described herein is within the skills of the one of the art. Such synthesis is, among others, described in Beaucage S. L. and Iyer R. P., Tetrahedron 1992; 48: 2223-2311, Beaucage S. L. and Iyer R. P., Tetrahedron 1993; 49: 6123-6194 and Caruthers M. H. et. al., Methods Enzymol. 1987; 154: 287-313, the synthesis of thioates is, among others, described in Eckstein F., Annu. Rev. Biochem. 1985; 54: 367-402, the synthesis of RNA molecules is described in Sproat B., in Humana Press 2005 Edited by Herdewijn P.; Kap. 2: 17-31 and respective downstream processes are, among others, described in Pingoud A. et. al., in IRL Press 1989 Edited by Oliver R. W. A.; Kap. 7: 183-208 and Sproat B., in Humana Press 2005 Edited by Herdewijn P.; Kap. 2: 17-31 (supra).

[0367] siRNA for RTP801L can be made using methods known in the art as described above, based on the known sequence of RTP801L (SEQ ID NO:1), and can be made stable by various modifications as described above. For further information, see Example 5.

### Combination Therapy

[0368] The present invention provides for combination therapy for all the conditions disclosed herein and in particular conditions involving choroidal neovascularization. In said combination therapy, both the RTP801L and VEGFR genes are inhibited in order to ameliorate the symptoms of the disease being treated. These genes are inhibited with a combination of siRNAs or antibodies (including aptamer antibodies) or both. The present invention therefore also provides for a novel pharmaceutical composition comprising an RTP801L inhibitor and a VEGF or VEGFR-1 inhibitor, the RTP801L inhibitor preferable being an siRNA, more preferably an siRNA molecule detailed in any one of Tables A-G, optionally-selected from the group consisting of the siRNAs of Table F, and the VEGF/VEGFR-1 inhibitor optionally being an antibody or aptamer. The combined use of said compounds (i.e., RTP801L siRNA and VEGF antibody or any other combined example disclosed herein) in the preparation of a medicament is also part of the present invention.

[0369] Thus, RTP801L siRNA such as an siRNA molecule detailed herein and in any one of Tables A-G and optionally siRNA Nos: DDIT4L_{—}14 or DDIT4L_{—}15 of Table F, are administered in conjunction with agents which target VEGF or VEGF receptor 1 (VEGFR1). Such agents currently exist on the market or in various stages of approval and work through different mechanisms. Antibodies and antibody fragments such as ranibizumab (Lucentis, Genentech) attach to released VEGF to inhibit binding of VEGF to active receptors. An aptamer which can act like a ligand/antibody (Macugen, Eyetech/Pfizer, approved recently by the FDA for wet AMD) is also a possibility. Macugen bonds with extracellular VEGF to block its activity. These drugs are administered locally by intravitreal injection. Anti-VEGF siRNA based compounds (such as Acuity's Cand5 inhibitor of VEGF or SIRNA's 027 inhibitor of VEGFR-1) are also available. Additionally, the small molecule aminosterol Squalamine (Genaera) which is administered systemically reportedly interferes in multiple facets of the angiogenic process, including inhibiting VEGF and other growth factor signaling in endothelial cells.

[0370] The conjoined administration of an RTP801L siRNA, and any of the above VEGF/VEGFR-1 inhibitory agents can have an additive or even synergistic effect whereby said combined treatment is more effective than treatment by any of these individual compositions, irrespective of dosage in the single therapy option. RTP801L siRNA has a different mechanism of action and is potentially additive or even synergistic with VEGF-VEGFR inhibitors.

[0371] Additional disorders which can be treated by the molecules and compositions of the present invention include all types of choroidal neovascularization (CNV), which occurs not only in wet AMD but also in other ocular pathologies such as ocular histoplasmosis syndrome, angiod streaks, ruptures in Bruch's membrane, myopic degeneration, ocular tumors and some retinal degenerative diseases.

[0372] An additional aspect of the present invention provides for methods of treating an apoptosis related disease. Methods for therapy of diseases or disorders associated with uncontrolled, pathological cell growth, e.g. cancer, psoriasis, autoimmune diseases, inter alia, and methods for therapy of diseases associated with ischemia and lack of proper blood flow, e.g. myocardial infarction (MI) and stroke, are provided. “Cancer” or “Tumor” refers to an uncontrolled growing mass of abnormal cells. These terms include both primary tumors, which may be benign or malignant, as well as secondary tumors, or metastases which have spread to other sites in the body. Examples of cancer-type diseases include, inter alia: carcinoma (e.g.: breast, colon and lung), leukemia such as B cell leukemia, lymphoma such as B-cell lymphoma, blastoma such as neuroblastoma and melanoma and sarcoma. It will be acknowledged that the pharmaceutical composition according to the present invention can be used for any disease which involves undesired development or growth of vasculature including angiogenesis, as well as any of the diseases and conditions described herein. Preferably, these kind of diseases are tumor diseases. Among tumor diseases, the following tumors are most preferred: endometrial cancer, colorectal carcinomas, gliomas, endometrial cancers, adenocarcinomas, endometrial hyperplasias, Cowden's syndrome, hereditary non-polyposis colorectal carcinoma, Li-Fraumene's syndrome, breast-ovarian cancer, prostate cancer (Ali, I. U., Journal of the National Cancer Institute, Vol. 92, no. 11, Jun. 7, 2000, page 861-863), Bannayan-Zonana syndrome, LDD (Lhermitte-Duklos' syndrome) (Macleod, K., supra) hamartoma-macrocephaly diseases including Cow disease (CD) and Bannayan-Ruvalcaba-Rily syndrome (BRR), mucocutaneous lesions (e.g. trichilemmonmas), macrocephaly, mental retardation, gastrointestinal harmatomas, lipomas, thyroid adenomas, fibrocystic disease of the breast, cerebellar dysplastic gangliocytoma and breast and thyroid malignancies (Vazquez, F., Sellers, W. R., supra).

[0373] The invention also provides a composition comprising one or more of the compounds of the invention in a carrier, preferably a pharmaceutically acceptable carrier. This composition may comprise a mixture of two or more siRNAs for different genes or different siRNAs for the same gene. A composition comprising siRNA for the RTP801L gene and siRNA for the VEGF gene and/or the VEGF-R1 gene is envisaged.

[0374] This invention also comprises a tandem double-stranded structure which comprises two or more siRNA sequences, which is processed intracellularly to form two or more different siRNAs, one inhibiting RTP801L and a second inhibiting VEGF/VEGFR-1. In a related aspect, this invention also comprises a tandem double-stranded structure which comprises two or more siRNA sequences, which is degraded intracellularly to form two or more different siRNAs, both inhibiting RTP801L.

[0375] In particular, it is envisaged that a long oligonucleotide (typically about 80-500 nucleotides in length) comprising one or more stem and loop structures, where stem regions comprise the sequences of the oligonucleotides of the invention, are delivered in a carrier, preferably a pharmaceutically acceptable carrier, and may be processed intracellularly by endogenous cellular complexes (e.g. by DROSHA and DICER as described above) to produce one or more smaller double stranded oligonucleotides (siRNAs) which are oligonucleotides of the invention. This oligonucleotide can be termed a tandem shRNA construct. It is envisaged that this long oligonucleotide is a single stranded oligonucleotide comprising one or more stem and loop structures, wherein each stem region comprises a sense and corresponding antisense siRNA sequence of an 801 gene. In particular, it is envisaged that this oligonucleotide comprises sense and antisense siRNA sequences as depicted in any one of Tables A-G. Alternatively, the tandem shRNA construct may comprise sense and complementary antisense siRNA sequence corresponding to an 801L gene and additionally sense and complementary antisense siRNA sequence corresponding to a different gene such as 801, VEGF or VEGF-R1.

[0376] As mentioned herein, siRNA against RTP801L are the main active component in a pharmaceutical composition, or are one active component of a pharmaceutical composition containing two or more siRNAs (or molecules which encode or endogenously produce two or more siRNAs, be it a mixture of molecules or one or more tandem molecule which encodes two or more siRNAs), said pharmaceutical composition further being comprised of one or more additional siRNA molecule which targets one or more additional gene. Simultaneous inhibition of RTP801L and said additional gene(s) has an additive or synergistic effect for treatment of the diseases disclosed herein, according to the following:

[0377] Acute Renal Failure (ARF) and other microvascular disorders: the pharmaceutical composition for treatment of ARF comprises of the following compound combinations: 1) RTP801L siRNA and p53 siRNA dimers; 2) RTP801L and Fas siRNA dimers; 3) RTP801L and Bax siRNA dimers; 4) p53 and Fas siRNA dimers; 5) RTP801L and Bax siRNA dimers; 6) RTP801L and Noxa siRNA dimers; 7) RTP801L and Puma siRNA dimers; 8) RTP801L (REDD1) and RTP801LL (REDD2) siRNA dimers; 9) RTP801LsiRNA, Fas siRNA and any of RTP801LL siRNA p53 siRNA, Bax siRNA, Noxa siRNA or Puma siRNA to form trimers or polymers (i.e., tandem molecules which encode three siRNAs).

[0378] Macular degeneration (MD), diabetic retinopathy (DR), spinal cord injury: pharmaceutical compositions for treatment of MD, DR and spinal cord injury comprises of the following

[0379] compound combinations: 1) RTP801L siRNA combined with either of VEGF siRNA, VEGF-R1 siRNA, VEGF R2 siRNA, PKCbeta siRNA, MCP1 siRNA, eNOS siRNA, KLF2 siRNA, RTP801 siRNA (either physically mixed or in a tandem molecule); 2) RTP801L siRNA in combination with two or more siRNAs of the above list (physically mixed or in a tandem molecule encoding three siRNAs, or a combination thereof).

[0380] COPD and respiratory disorders: the pharmaceutical composition for treatment of respiratory disorders comprises of the following compound combinations: RTP801L siRNA combined with siRNA against one or more of the following genes: elastases, matrix metalloproteases, phospholipases, caspases, sphingomyelinase, RTP801 and ceramide synthase.

[0381] Further, a combination (tandem) siRNA directed against both RTP801 and RTP801L can be used to treat any of the conditions disclosed herein. For Example, the siRNA directed against RTP801 termed REDD14 (sense sequence: 5′ GUGCCAACCUGAUGCAGCU 3′ and antisense sequence 5′ AGCUGCAUCAGGUUGGCAC 3′) can be joined in tandem with any of the RTP801L siRNAs disclosed herein, such as an siRNA of Table F, or any other siRNA present in any one of Tables A-G.

[0382] Additionally, RTP801L siRNA or any nucleic acid molecule comprising or encoding RTP801L siRNA can be linked (covalently or non-covalently) to antibodies, in order to achieve enhanced targeting for treatment of the diseases disclosed herein, according to the following:

[0383] ARF: anti-Fas antibody (preferably neutralizing antibodies).

[0384] Macular degeneration, diabetic retinopathy, spinal cord injury: anti-Fas antibody, anti-MCP1 antibody, anti-VEGFR1 and anti-VEGFR2 antibody. The antibodies should be preferably be neutralizing antibodies.

[0385] Any molecules, such as, for example, antisense DNA molecules which comprise the siRNA sequences disclosed herein (with the appropriate nucleic acid modifications) are particularly desirable and are used in the same capacity as their corresponding siRNAs for all uses and methods disclosed herein.

[0386] The invention also comprises a method of treating a patient suffering from a disorder such as the disorders described herein comprising administering to the patient the above composition or compound in a therapeutically effective dose so as to thereby treat the patient.

### Macular Degeneration

[0387] The most common cause of decreased best-corrected vision in individuals over 65 years of age in the US is the retinal disorder known as age-related macular degeneration (AMD). As AMD progresses, the disease is characterized by loss of sharp, central vision. The area of the eye affected by AMD is the Macula, a small area in the center of the retina, composed primarily of photoreceptor cells. So-called “dry” AMD, accounting for about 85%-90% of AMD patients, involves alterations in eye pigment distribution, loss of photoreceptors and diminished retinal function due to overall atrophy of cells. So-called “wet” AMD involves proliferation of abnormal choroidal vessels leading to clots or scars in the sub-retinal space. Thus, the onset of wet AMD occurs because of the formation of an abnormal choroidal neovascular network (choroidal neovascularization, CNV) beneath the neural retina. The newly formed blood vessels are excessively leaky. This leads to accumulation of subretinal fluid and blood leading to loss of visual acuity. Eventually, there is total loss of functional retina in the involved region, as a large disciform scar involving choroids and retina forms. While dry AMD patients may retain vision of decreased quality, wet AMD often results in blindness. (Hamdi & Kenney, May 2003. Frontiers in Bioscience, e305-314).

[0388] Acuity Pharmaceuticals and Sirna Therapeutics, have both recently filed an IND for siRNA molecules inhibiting VEGF and VEGF-R1 (Flt-1), respectively, for treatment of AMD. These molecules are termed Candy and Sirna-027 respectively.

### Glaucoma

[0389] Glaucoma is one of the leading causes of blindness in the world. It affects approximately 66.8 million people worldwide. At least 12,000 Americans are blinded by this disease each year (Kahn and Milton, 1980. Am J Epidemiol. 111(6):769-76). Glaucoma is characterized by the degeneration of axons in the optic nerve head, primarily due to elevated intraocular pressure (IOP). One of the most common forms of glaucoma, known as primary open-angle glaucoma (POAG), results from the increased resistance of aqueous humor outflow in the trabecular meshwork (TM), causing IOP elevation and eventual optic nerve damage. Mucke (IDrugs 2007, 10(1):37-41) reviews current therapeutics, including siRNA to various targets for the treatment of ocular diseases, for example, age-related macular degeneration (AMD) and glaucoma. Administration of neuroprotective agents has also been shown to be a viable treatment for glaucoma. The present invention provides RTP801L siRNA useful as a neuroprotective agent in the treatment of ION, AION, and glaucoma.

### Ischemic Optic Neuropathy (ION)

[0390] A severely blinding disease resulting from loss of the arterial blood supply to the optic nerve (usually in one eye), as a result of occlusive disorders of the nutrient arteries. Optic neuropathy can be anterior (AION), which causes a pale edema of the optic disc, or posterior, in which the optic disc is not swollen and the abnormality occurs between the eyeball and the optic chiasm. Ischemic anterior optic neuropathy usually causes a loss of vision that may be sudden or occur over several days. Ischemic posterior optic neuropathy is uncommon, and the diagnosis depends largely upon exclusion of other causes, chiefly stroke and brain tumor.

### Dry-Eye Syndrome

[0391] Dry eye syndrome is a common problem usually resulting from a decrease in the production of tear film that lubricates the eyes. Most patients with dry eye experience discomfort, and no vision loss; although in severe cases, the cornea may become damaged or infected. Wetting drops (artificial tears) may be used for treatment while lubricating ointments may help more severe cases.

### Microvascular Disorders

[0392] Microvascular disorders are composed of a broad group of conditions that primarily affect the microscopic capillaries and lymphatics and are therefore outside the scope of direct surgical intervention. Microvascular disease can be broadly grouped into the vasospastic, the vasculitis and lymphatic occlusive. Additionally, many of the known vascular conditions have a microvascular element to them.

Microvascular Pathologies Associated with Diabetes

[0393] Diabetes is the leading cause of blindness, the major cause of amputations and impotence, and one of the most frequently occurring chronic childhood diseases. Diabetes is also the leading cause of end-stage renal disease in the United States, with a prevalence rate of 31% compared with other renal diseases. Diabetes is also the most frequent indication for kidney transplantation, accounting for 22% of all transplantation operations.

[0394] In general, diabetic complications can be classified broadly as microvascular or macrovascular disease. Microvascular complications include neuropathy (nerve damage), nephropathy (kidney disease) and vision disorders (eg retinopathy, glaucoma, cataract and corneal disease). In the retina, glomerulus, and vasa nervorum, similar pathophysiologic features characterize diabetes-specific microvascular disease. All the above listed conditions and pathologies are also be referred to herein as conditions “secondary to diabetes”.

### Emphysema and COPD

[0395] Among the mechanisms that underlie lung destruction in emphysema, excessive formation of reactive oxygen species (ROS) should be first of all mentioned. It is well established that prooxidant/antioxidant imbalance exists in the blood and in the lung tissue of smokers (Hulea S A, et al: 1995. J Environ Pathol Toxicol Oncol. 14(3-4):173-80.; Rahman I, MacNee W. 1999. Am J. Physiol. 277(6 Pt 1):L1067-88.; MacNee W. 2000 Chest. 117(5 Suppl 1):303S-17S; Marwick J A, et al., 2002. Ann N Y Acad. Sci. 973:278-83; Aoshiba K, et al., 2003. Inhal Toxicol. (10):1029-38; Dekhuijzen P N. 2004. Eur Respir J. 23(4):629-36; Tuder R M, et al., 2003. Am J Respir Cell Mol Biol, 29:88-97). After one hour exposure of mice to CS, there is a dramatic increase of 8-hydroxy-2′-deoxyguanosine (8-OHdG) in the alveolar epithelial cells, particularly of type II (see Inhal Toxicol. 2003 15(10):1029-38, above).

[0396] Overproduced reactive oxygen species are known for their cytotoxic activity, which stems from a direct DNA damaging effect and from the activation of apoptotic signal transduction pathways (Takahashi et al., 2004. Brain Res Bull. 62(6):497-504; Taniyama Y, Griendling K K. 2003. Hypertension. 42(6):1075-81; Higuchi Y. 2003. Biochem Pharmacol. 66(8):1527-35; Punj V, Chakrabarty A M. 2003. Cell Microbiol. (4):225-31.; Ueda et al., 2002 Antioxid Redox Signal. 4(3):405-14).

[0397] Both reactive oxygen species (ROS) from inhaled cigarette smoke and those endogenously formed by inflammatory cells contribute to an increased intrapulmonary oxidant burden.

[0398] One additional pathogenic factor with regards to COPD pathogenesis is the observed decreased expression of VEGF and VEGFR11 in lungs of emphysematous patients (Kasahara, et al., 2001, Am J Respir Crit Care Med. 163:737-744). Moreover, inhibition of VEGF signaling using chemical VEGFR inhibitor leads to alveolar septal endothelial and then to epithelial cell apoptosis, probably due to disruption of intimate structural/functional connection of both types of cells within alveoli (Kasahara, et al., 2000. J. Clin. Invest. 106:1311-1319; Voelkel N F, Cool C D. 2003. Eur Respir J Suppl. 46:28s-32s).

### Diabetic Neuropathy

[0399] Diabetic neuropathies are neuropathic disorders (peripheral nerve damage) associated with diabetes mellitus. These conditions usually result from diabetic microvascular injury involving small blood vessels that supply nerves (vasa nervorum). Relatively common conditions which are associated with diabetic neuropathy include third nerve palsy; mononeuropathy; mononeuropathy multiplex; diabetic amyotrophy; a painful polyneuropathy; autonomic neuropathy; and thoracoabdominal neuropathy and the most common form, peripheral neuropathy, which mainly affects the feet and legs. There are four factors involved in the development of diabetic neuropathy: microvascular disease, advanced glycated end products, protein kinase C, and the polyol pathway. The compounds of the present invention are useful in treating microvascular disease in diabetic neuropathy.

[0400] Neuropathy is a common complication of diabetes occurring over time in more than half of patients with type 2 diabetes. Nerve conduction studies demonstrate that neuropathy is already present in 10-18% of patients at the time of diabetes diagnosis, suggesting that peripheral nerve injury occurs at early stages of disease and with milder glycemic dysregulation. The concept that neuropathy is an early clinical sign of diabetes was proposed >40 years ago, and most studies report an association between IGT and neuropathy. Most patients with IGT and associated neuropathy have a symmetric, distal sensory polyneuropathy with prominent neuropathic pain. IGT neuropathy (Singleton, J R et al. 2003. 1: Diabetes 52(12):2867-73) is phenotypically similar to early diabetic neuropathy, which also causes sensory symptoms, including pain, and autonomic dysfunction.

[0401] Autonomic dysfunction, particularly erectile dysfunction and altered cardiac vagal response, are common early features of neuropathic injury in diabetes. Work with IGT patients also suggests prevalent vagal dysautonoinia: separate studies have found abnormal heart rate recovery following exercise, blunted R-R interval variability to deep breathing, and reduced expiration to inspiration ratio (all measures of vagal dysautonomia) in a greater fraction of IGT patients than age-matched normoglycemic control subjects.

[0402] For further information, see American Journal of Surgery, Volume 187 • Number 5 Suppl 1 • May 1, 2004, Elsevier.

### Coronary Microvascular Dysfunction in Diabetes

[0403] The correlation between histopathology and microcirculatory dysfunction in diabetes is well known from old experimental studies and from autopsy, where thickening of the basal membrane, perivascular fibrosis, vascular rarefication, and capillary hemorrhage are frequently found. The following papers relate to microvascular dysfunction (Am J Physiol 2003; 285; Hypert Res 2002; 25:893; Sambuceti et al., Circulation 2001.104:1129; Stone 2002; Feldmann Circulation 2003; Herrmann, Circulation 2001).

Diabetic Nephropathy (Renal Dysfunction in Patients with Diabetes)

[0404] Diabetic nephropathy encompasses microalbuminuria (a microvascular disease effect), proteinuria and ESRD. Diabetes is the most common cause of kidney failure, accounting for more than 40 percent of new cases. Even when drugs and diet are able to control diabetes, the disease can lead to nephropathy and kidney failure. Most people with diabetes do not develop nephropathy that is severe enough to cause kidney failure. About 16 million people in the United States have diabetes, and about 100,000 people have kidney failure as a result of diabetes.

### Diabetic Retinopathy

[0405] In the diabetic state, hyperglycemia leads to decreased retinal blood flow, retinal hyperpermeability, delays in photoreceptor nerve conduction, and retinal neuronal cell death. In short duration diabetes, neuronal cell death has been identified within the inner nuclear layer of the retina. Specifically, apoptosis has been localized to glial cells such as Mueller cells and astrocytes and has been shown to occur within 1 month of diabetes in the STZ-induced diabetic rat model. The cause of these events is multi-factorial including activation of the diacylglycerol/PKC pathway, oxidative stress, and nonenzymatic glycosylation. The combination of these events renders the retina hypoxic and ultimately leads to the development of diabetic retinopathy. One possible connection between retinal ischemia and the early changes in the diabetic retina is the hypoxia-induced production of growth factors such as VEGF. The master regulator of the hypoxic response has been identified as hypoxia inducible factor-1 (HIF-1), which controls genes that regulate cellular proliferation and angiogenesis. Prior studies have demonstrated that inhibition of HIF-1 ubiquitination leads to binding with hypoxia responsive elements (HRE) and production of VEGF mRNA.

[0406] Diabetic Retinopathy is defined as the progressive dysfunction of the retinal vasculature caused by chronic hyperglycemia. Key features of diabetic retinopathy include microaneurysms, retinal hemorrhages, retinal lipid exudates, cotton-wool spots, capillary nonperfusion, macular edema and neovascularization. Associated features include vitreous hemorrhage, retinal detachment, neovascular glaucoma, premature cataract and cranial nerve palsies.

[0407] A microvascular disease that primarily affects the capillaries, diabetes mellitus affects the eye by destroying the vasculature in the conjunctiva, retina and central nervous system.

### Neuropathy

[0408] Neuropathy affects all peripheral nerves: pain fibers, motor neurons, autonomic nerves. It therefore necessarily can affect all organs and systems since all are innervated. There are several distinct syndromes based on the organ systems and members affected, but these are by no means exclusive. A patient can have sensorimotor and autonomic neuropathy or any other combination. Despite advances in the understanding of the metabolic causes of neuropathy, treatments aimed at interrupting these pathological processes have been limited by side effects and lack of efficacy. Thus, treatments are symptomatic and do not address the underlying problems. Agents for pain caused by sensorimotor neuropathy include tricyclic antidepressants (TCAs), serotonin reuptake inhibitors (SSRIs) and antiepileptic drugs (AEDs). None of these agents reverse the pathological processes leading to diabetic neuropathy and none alter the relentless course of the illness. Thus, it would be useful to have a pharmaceutical composition that could better treat these conditions and/or alleviate the symptoms.

### Retinal Microvasculopathy (AIDS Retinopathy)

[0409] Retinal microvasculopathy is seen in 100% of AIDS patients. It is characterized by intraretinal hemorrhages, microaneurysms, Roth spots, cotton-wool spots (microinfarctions of the nerve fiber layer) and perivascular sheathing. The etiology of the retinopathy is unknown though it has been thought to be due to circulating immune complexes, local release of cytotoxic substances, abnormal hemorheology, and HIV infection of endothelial cells. AIDS retinopathy is now so common that cotton wool spots in a patient without diabetes or hypertension but at risk for HIV should prompt the physician to consider viral testing. There is no specific treatment for AIDS retinopathy but its continued presence may prompt a physician to reexamine the efficacy of the HIV therapy and patient compliance.

### Bone Marrow Transplantation (BMT) Retinopathy

[0410] Bone marrow transplantation retinopathy was first reported in 1983. It typically occurs within six months, but it can occur as late as 62 months after BMT. Risk factors such as diabetes and hypertension may facilitate the development of BMT retinopathy by heightening the ischemic microvasculopathy. There is no known age, gender or race predilection for development of BMT retinopathy. Patients present with decreased visual acuity and/or visual field deficit. Posterior segment findings are typically bilateral and symmetric. Clinical manifestations include multiple cotton wool spots, telangiectasia, microaneurysms, macular edema, hard exudates and retinal hemorrhages. Fluorescein angiography demonstrates capillary nonperfusion and dropout, intraretinal microvascular abnormalities, microaneurysms and macular edema. Although the precise etiology of BMT retinopathy has not been elucidated, it appears to be affected by several factors: cyclosporine toxicity, total body irradiation (TBI), and chemotherapeutic agents. Cyclosporine is a powerful immunomodulatory agent that suppresses graft-versus-host immune response. It may lead to endothelial cell injury and neurologic side effects, and as a result, it has been suggested as the cause of BMT retinopathy. However, BMT retinopathy can develop in the absence of cyclosporine use, and cyclosporine has not been shown to cause BMT retinopathy in autologous or syngeneic bone marrow recipients. Cyclosporine does not, therefore, appear to be the sole cause of BMT retinopathy. Total body irradiation (TBI) has also been implicated as the cause of BMT retinopathy. Radiation injures the retinal microvasculature and leads to ischemic vasculopathy. Variables such as the total dose of radiation and the time interval between radiation and bone marrow ablation appear to be important. However, BMT retinopathy can occur in patients who did not receive TBI, and BMT retinopathy is not observed in solid organ transplant recipients who received similar doses of radiation. Thus, TBI is not the sole cause, but it is another contributing factor in development of BMT retinopathy. Chemotherapeutic agents have been suggested as a potential contributing factor in BMT retinopathy. Medications such as cisplatin, carmustine, and cyclophosphamide can cause ocular side effects including papilledema, optic neuritis, visual field deficit and cortical blindness. It has been suggested that these chemotherapeutic drugs may predispose patients to radiation-induced retinal damages and enhance the deleterious effect of radiation. In general, patients with BMT retinopathy have a good prognosis. The retinopathy usually resolves within two to four months after stopping or lowering the dosage of cyclosporine. In one report, 69 percent of patients experienced complete resolution of the retinal findings, and 46 percent of patients fully recovered their baseline visual acuity. Because of the favorable prognosis and relatively non-progressive nature of BMT retinopathy, aggressive intervention is usually not necessary.

### Microvascular Diseases of the Kidney

[0411] The kidney is involved in a number of discreet clinicopathologic conditions that affect systemic and renal microvasculature. Certain of these conditions are characterized by primary injury to endothelial cells, such as: Hemolytic-uremic syndrome (HUS) and thrombotic thrombocytopenic purpura (TTP) and Radiation nephritis—The long-term consequences of renal irradiation in excess of 2500 rad.

[0412] In other kidney diseases, the microvasculature of the kidney is involved in autoimmune disorders, such as systemic sclerosis (scleroderma). Kidney involvement in systemic sclerosis manifests as a slowly progressing chronic renal disease or as scleroderma renal crisis (SRC), which is characterized by malignant hypertension and acute azotemia. It is postulated that SRC is caused by a Raynaud-like phenomenon in the kidney. Severe vasospasm leads to cortical ischemia and enhanced production of renin and angiotensin II, which in turn perpetuate renal vasoconstriction. Hormonal changes (pregnancy), physical and emotional stress, or cold temperature may trigger the Raynaud-like arterial vasospasm. The role of the renin-angiotensin system in perpetuating renal ischemia is underscored by the significant benefit of ACE inhibitors in treating SRC. In patients with SRC who progress to severe renal insufficiency despite antihypertensive treatment, dialysis becomes a necessity. Both peritoneal dialysis and hemodialysis have been employed. The End-Stage Renal Disease (ESRD) Network report on 311 patients with systemic sclerosis-induced ESRD dialyzed between 1983 and 1985 revealed a 33% survival rate at 3 years.

[0413] The renal microcirculation can also be affected in sickle cell disease, to which the kidney is particularly susceptible because of the low oxygen tension attained in the deep vessels of the renal medulla as a result of countercurrent transfer of oxygen along the vasa recta. The smaller renal arteries and arterioles can also be the site of thromboembolic injury from cholesterol-containing material dislodged from the walls of the large vessels.

[0414] Taken as a group, diseases that cause transient or permanent occlusion of renal microvasculature uniformly result in disruption of glomerular perfusion, and hence of the glomerular filtration rate, thereby constituting a serious threat to systemic homeostasis.

[0415] An additional embodiment of the present invention provides for the use of a therapeutically effective dose of an RTP801L inhibitor for the preparation of a medicament for promoting recovery in a patient suffering from any of the diseases or conditions described herein eg spinal cord disease or injury. In one embodiment the inhibitor is preferably an siRNA. In another embodiment the inhibitor is preferably Structure A depicted herein.

[0416] The invention has been described in an illustrative manner, and it is to be understood that the terminology which has been used is intended to be in the nature of words of description rather than of limitation.

[0417] Obviously, many modifications and variations of the present invention are possible in light of the above teachings. It is, therefore, to be understood that within the scope of the appended claims, the invention can be practiced otherwise than as specifically described.

[0418] Throughout this application, various publications, including United States patents, are referenced by author and year and patents by number. The disclosures of these publications and patents and patent applications in their entireties are hereby incorporated by reference into this application in order to more fully describe the state of the art to which this invention pertains.

[0419] Citation of any document herein is not intended as an admission that such document is pertinent prior art, or considered material to the patentability of any claim of the present application. Any statement as to content or a date of any document is based on the information available to applicant at the time of filing and does not constitute an admission as to the correctness of such a statement.

[0420] The present invention is illustrated in detail below with reference to examples, but is not to be construed as being limited thereto.

### EXAMPLES

[0421] Without further elaboration, it is believed that one skilled in the art can, using the preceding description, utilize the present invention to its fullest extent. The following preferred specific embodiments are, therefore, to be construed as merely illustrative, and not limitative of the claimed invention in any way.

[0422] Standard molecular biology protocols known in the art not specifically described herein are generally followed essentially as in Sambrook et al., Molecular cloning: A laboratory manual, Cold Springs Harbor Laboratory, New-York (1989, 1992), and in Ausubel et al., Current Protocols in Molecular Biology, John Wiley and Sons, Baltimore, Md. (1988).

[0423] Standard organic synthesis protocols known in the art not specifically described herein are generally followed essentially as in Organic Syntheses: Vol. 1-79, editors vary, J. Wiley, New York, (1941-2003); Gewert et al., Organic synthesis workbook, Wiley-VCH, Weinheim (2000); Smith & March, Advanced Organic Chemistry, Wiley-Interscience; 5th ed. (2001).

[0424] Standard medicinal chemistry methods known in the art not specifically described herein are generally followed essentially as in the series “Comprehensive Medicinal Chemistry”, by various authors and editors, published by Pergamon Press.

[0425] The features of the present invention disclosed in the specification, the claims and/or the drawings may both separately and in any combination thereof be material for realizing the invention in various forms thereof.

### General Materials and Methods

### Cell Culture

[0426] The first human cell line, namely HeLa cells (American Type Culture Collection) were cultured as follows: Hela cells (American Type Culture Collection) were cultured as described in Czauderna F et al. (Czauderna, F., et al., 2003. Nucleic Acids Res, 31, 670-82).

[0427] The second human cell line was a human keratinozyte cell line which was cultivated as follows: Human keratinocytes were cultured at 37° C. in Dulbecco's modified Eagle medium (DMEM) containing 10% FCS. The mouse cell line was B16V (American Type Culture Collection) cultured at 37° C. in Dulbecco's modified Eagle medium (DMEM) containing 10% FCS. Culture conditions were as described in Methods Find Exp Clin Pharmacol. 1997 19(4):231-9.

[0428] In each case, the cells were subject to the experiments as described herein at a density of about 50,000 cells per well and the double-stranded nucleic acid according to the present invention was added at 20 nM, whereby the double-stranded nucleic acid was complexed using 1 μg/ml of a proprietary lipid.

### Induction of Hypoxia-Like Condition

[0429] The cells were treated with CoCl₂ for inducing a hypoxia-like condition as follows: siRNA transfections were carried out in 10-cm plates (30-50% confluency) as described by (Czauderna et al., 2003; Kretschmer et al., 2003). Briefly, siRNA were transfected by adding a preformed 10× concentrated complex of GB and lipid in serum-free medium to cells in complete medium. The total transfection volume was 10 ml. The final lipid concentration was 1.0 μg/ml; the final siRNA concentration was 20 nM unless otherwise stated. Induction of the hypoxic responses was carried out by adding CoCl₂ (100 μM) directly to the tissue culture medium 24 h before lysis.

### Preparation of Cell Extracts and Immuno Blotting

[0430] The preparation of cell extracts and immuno blot analysis were carried out essentially as described by Klippel et al. (Klippel, A., et al., 1998. Mol Cell Biol, 18, 5699-711; Klippel, A., et al., 1996. Mol Cell Biol, 16, 4117-27). Polyclonal antibodies against full length RTP801L were generated by immunising rabbits with recombinant RTP801L protein producing bacteria from pET19-b expression vector (Merck Biosciences GmbH, Germany). The murine monoclonal anti-p110a and anti-p85 antibodies have been described by Klippel et al. (supra).

In Vitro Testing of siRNA Compounds

[0431] About 1.5−2×10⁵ tested cells (HeLa cells and/or 293T cells for siRNA targeting human genes and NRK52 (normal rat kidney proximal tubule cells) cells and/or NMuMG cells (mouse mammary epithelial cell line) for siRNA targeting the rat/mouse gene) were seeded per well in 6 wells plate (70-80% confluent). See also Example 14 hereinbelow.

[0432] About 24 hours later, cells were transfected with siRNA compounds using the Lipofectamine™ 2000 reagent (Invitrogen) at final concentrations of 5 nM or 20 nM. The cells were incubated at 37° C. in a CO₂ incubator for 72 h.

[0433] As positive control for transfection PTEN-Cy3 labeled siRNA compounds were used. Various chemically modified blunt ended siRNA compounds having alternating modified and unmodified ribonucleotides (modified at the 2′ position of the sugar residue in both the antisense and the sense strands, wherein the moiety at the 2′ position of the sugar is methoxy) and wherein the ribonucleotides at the 5′ and 3′ termini of the antisense strand are modified in their sugar residues, and the ribonucleotides at the 5′ and 3′ termini of the sense strand are unmodified in their sugar residues were tested. Another siRNA compound comprised a blunt ended structure having an antisense with an alternating pattern of methoxy moieties and a sense strand with three ribonucleotides linked by two 2′5′ bridges at the 3′ terminus; and another siRNA compound comprising antisense and sense strands having three ribonucleotides linked by 2′5′ bridges at the 3′ terminus was used. Some of the tested compounds comprised a blunt ended structure having an antisense with an alternating pattern of methoxy moieties and a sense strand with one or two L-deoxynucleotides at the 3′ terminal or 3′ penultimate positions.

[0434] GFP siRNA compounds were used as negative control for siRNA activity.

[0435] At 72 h after transfection cells were harvested and RNA was extracted from cells. Transfection efficiency was tested by fluorescent microscopy.

[0436] The percent of inhibition of gene expression using specific preferred siRNA structures was determined using qPCR analysis of a target gene in cells expressing the endogenous gene.

[0437] In general, the siRNAs having specific sequences that were selected for in vitro testing were specific for human and a second species such as non-human primate, rat or rabbit genes. Similar results are obtained using siRNAs having these RNA sequences and modified as described herein.

### Serum Stability Experiments

[0438] Chemically modified siRNA compounds according to the present invention were tested for duplex stability in human serum, as follows:

[0439] siRNA molecules at final concentration of 7 uM were incubated at 37° C. in 100% human serum (Sigma Cat# H4522). (siRNA stock 100 uM diluted in human serum 1:14.29).

[0440] 5 ul were added to 15 ul 1.5×TBE-loading buffer at different time points (0, 30 min, 1 h, 3 h, 6 h, 8 h, 10 h, 16 h and 24 h)

[0441] Samples were immediately frozen in liquid nitrogen and were kept at −20° C.

[0442] Each sample was loaded onto a non-denaturing 20% acrylamide gel, prepared according to methods known in the art.

[0443] The oligos were visualized with Ethidium bromide under UV light.

### Example 1

### Chemically Modified RTP801L siRNA

[0444] Table 1 hereinbelow provides a code of the modified nucleotides/unconventional moieties utilized in preparing the siRNA oligonucleotides of the present invention.

TABLE 1

| Code | modification |
|---|---|
| Nuc | |
| 5medG | 5-methyl-deoxyriboguanosine-3′-phosphate |
| c6Np | Amino modifier C6 (Glen Research 10-1906-xx) |
| dA | deoxyriboadenosine-3′-phosphate |
| dB | abasic deoxyribose-3′-phosphate |
| dC | deoxyribocytidine-3′-phosphate |
| dG | deoxyriboguanosine-3′-phosphate |
| dT | thymidine-3′-phosphate |
| dT$ | thymidine (no phosphate) |
| enaA$ | ethylene-bridged nucleic acid adenosine (no phosphate) |
| enaC | ethylene-bridged nucleic acid cytidine 3′ phosphate |
| enaG | ethylene-bridged nucleic acid guanosine 3′ phosphate |
| enaT | ethylene-bridged nucleic acid thymidine 3′ phosphate |
| iB | inverted deoxyabasic |
| LdA | L-deoxyriboadenosine-3′-phosphate (mirror image dA) |
| LdA$ | L-deoxyriboadenosine (no phosphate) (mirror image dA) |
| LdC | L-deoxyribocytidine-3′-phosphate (mirror image dC) |
| LdC$ | L-deoxyribocytidine (no phosphate) (mirror image dC) |
| LdG | L-deoxyriboguanosine-3′-phosphate (mirror image dG) |
| LdT | L-deoxyribothymidine-3′-phosphate (mirror image dT) |
| LdT$ | L-deoxyribothymidine (no phosphate) (mirror image dT) |
| mA | 2′-O-methyladenosine-3′-phosphate |
| mA$ | 2′-O-methyladenosine (no phosphate) |
| mC | 2′-O-methylcytidine-3′-phosphate |
| mC$ | 2′-O-methylcytidine (no 3′-phosphate) |
| mG | 2′-O-methylguanosine-3′-phosphate |
| mG$ | 2′-O-methylguanosine (no phosphate) |
| mU | 2′-O-methyluridine-3′-phosphate |
| mU$ | 2′-O-methyluridine (no phosphate) |
| rA | riboadenosine-3′-phosphate |
| rA$ | riboadenosine (no phosphate) |
| rC | ribocytidine-3′-phosphate |
| rC$ | ribocytidine (no phosphate) |
| rC2p | ribocytidine-2′-phosphate |
| rG | riboguanosine-3′-phosphate |
| rG2p | riboguanosine-2′-phosphate |
| rU | ribouridine-3′-phosphate |
| rU$ | ribouridine (no phosphate) |
| rU2p | ribouridine-2′-phosphate |

[0445] Tables A-E provide antisense and sense pairs of oligonucleotides useful in synthesis of the siRNA compounds according to the present invention. All oligonucleotides are presented as 5′-3′ sequences. (Hum=human, chin=chinchilla, chimp=chimpanzee, ms=mouse). Table F (FIG. 2) provides certain preferred sense and corresponding antisense oligonucleotides useful in the preparation of siRNA compounds. Table G, (FIG. 3) provides chemically modified siRNA compounds, whereby the sense and antisense sequences are provided in code according to Table 1 above. In vitro activity of the compounds is also presented in Table G. The legend for Table G is as follows:

1: Activity in 293 human cells at 20 nM. % residual transcript relative to untreated control;
2: Activity in 293 human cells at 5 nM—% residual transcript relative to untreated control;
3: Activity in rat C6 cells at 20 nM—% residual transcript relative to untreated control
4: Activity in rat C6 cells at 5 nM—% residual transcript relative to untreated control;
5. Stability in Human serum (hours) “-” refers to less than 3 hours duplex stability in 100% human serum.

[0446] FIG. 8 shows the sequence, structure, activity and serum stability of siRNA compounds according to the present invention. The oligonucleotides are presented 5′-3′, with sense strand above the antisense strand.

### Example 2

### Experimental Models, Methods and Results Relating to Ocular Disease

[0447] The compounds of the present invention are tested in the following animal model of Choroidal neovascularization (CNV). This hallmark of wet AMD is induced in model animals by laser treatment.

### A) Mouse Model

[0448] Choroidal neovascularization (CNV) induction: Choroid neovascularization (CNV), a hallmark of wet AMD, is triggered by laser photocoagulation (532 nm, 200 mW, 100 ms, 75 μm) (OcuLight GL, Iridex, Mountain View, Calif.) performed on both eyes of each mouse on day 0 by a single individual masked to drug group assignment. Laser spots are applied in a standardized fashion around the optic nerve, using a slit lamp delivery system and a cover slip as a contact lens.

### Treatment Groups

[0449] CNV is induced in the following groups of mice (males 6-8 weeks of age): Both eyes of each mouse are laser-treated.

12 WT mice;
12 RTP801L Knock-Out mice;
12 WT mice injected with 0.25 μg of synthetic stabilized active anti-RTP801L siRNA in one eye and inactive anti-RTP801L siRNA (REDD8-negative control) in the fellow eye, at days 0 and 7;
12 WT mice injected with 0.25 μg of synthetic stabilized active anti-RTP801L siRNA in one eye and inactive anti-GFP siRNA (negative control) in the fellow eye at days 0 and 7;
12 WT mice injected with either 0.1 μg of synthetic stabilized active anti-RTP801L siRNA in one eye and PBS (negative control) in the fellow eye at days 0 and 7;12 WT mice injected with either 0.05 μg of synthetic stabilized active anti-RTP801L siRNA in one eye and PBS (negative control) in the fellow eye at days 0 and 7.

[0450] Evaluation: The experiment is terminated at day 14. For evaluation, the eyes are enucleated and fixed with 4% paraformaldehyde for 30 min at 4° C. The neurosensory retina is detached and severed from the optic nerve. The remaining RPE-choroid-sclera complex is flat mounted in Immu-Mount (Vectashield Mounting Medium, Vector) and coverslipped. Flat mounts are examined with a scanning laser confocal microscope (TCS SP, Leica, Germany). Vessels are visualized by exciting with blue argon laser. Horizontal optical sections (1 μm step) are obtained from the surface of the RPE-choroid-sclera complex. The deepest focal plane in which the surrounding choroidal vascular network connecting to the lesion can be identified is judged to be the floor of the lesion. Any vessel in the laser treated area and superficial to this reference plane is judged as CNV. Images of each section are digitally stored. The area of CNV-related fluorescence is measured by computerized image analysis using the Leica TCS SP software. The summation of whole fluorescent area in each horizontal section is used as an index for the volume of CNV.

[0451] Separate WT mice are used for evaluating RTP801L mRNA expression in CNV (as well as the expression of other genes relevant to AMD) (untreated and treated with siRNA) using real-time PCR on RNA extracted from RPE/choroids, or from neural retina.

[0452] Expression profiling conducted in the mouse model of CNV revealed that the RTP801L transcript level is gradually increased in mouse Retina following CNV induction, thus indicating that RTP801L is a good target for inhibition in the treatment of AMD and other conditions which involve choroidal neovascularization.

### B) Non-Human Primate Model

[0453] CNV induction: Choroidal neovascularization (CNV) is induced by perimacular laser treatment of both eyes prior to doseadministration. Nine lesions are placed in the macula with a laser [OcuLight GL (532 nm) Laser Photo-coagulator with an IRIS Medical® Portable Slit Lamp Adaptor], and laser spots in the right eye mirror the placement in the left eye. The approximate laser parameters are as follows: spot size: 50-100 μm diameter; laser power: 300-700 milliwatts; exposure time: 0.1 seconds.

[0454] Treatment: Immediately following laser treatment, both eyes of all animals are subjected to a single intravitreal injection. Left eye is typicality dosed with 350 ug of synthetic stabilized siRNA against RTP801L in the final volume of 50 ul, whereas the contralateral eye receives 50 ul of PBS (vehicle).

### Evaluation

[0455] 1. All the animals are subjected to daily examination of food consumption and body weight measurements.
[0456] 2. two monkeys are euthanized at day 6 following CNV induction. Their eyes are enucleated and the posterior pole is flattened. Then the fovea region is excised and separated into choroids and neuroretina which are separately (for every animal) frozen in liquid nitrogen to be subsequently used for RNA extraction and real time PCR evaluation of RTP801L expression.
[0457] 3. Fluorescein angiograms are performed pre-study, and at the end of weeks 1, 2, and 3 following CNV induction. Photographs are taken, using a fundus camera (TRC-50EX Retina Camera). Images are captured using the TOPCON IMAGEnet™ system. Fluorescein dye (10% fluorescein sodium, approximately 0.1 mL/kg) is injected via vascular access ports. Photographs are taken at several timepoints following dye injection, to include the arterial phase, early arteriovenous phase and several late arteriovenous phases in order to evaluate neovascularization and to monitor leakage of fluorescein associated with CNV lesions. Interpretation and analysis of the fluorescein angiograms is independently conducted by two ophthalmologists.

[0458] Neovascularization (NV) is assessed in early angiograms and every spot is graded according to the following scheme:

| | |
|---|---|
| 0 | no signs of NV |
| 0.5 | suspicious spot |
| 1 | “hot” spot |
| 2 | NV in the laser burn |
| 3 | evident NV |

[0459] Leakage is assessed according to the following scheme:

| | |
|---|---|
| 0 | no leakage |
| 0.5 | suspicious spot |
| 1 | evident small spot leakage |
| 2 | leakage growing with time |
| 3 | leakage greater than previous borders (evidently) |

[0460] In addition, the size of every spot is compared between the early and the late angiograms using morphometric measurements, and the increase in the spot's size resulting from the leakage is calculated.

[0461] Electroretinograms (ERGs) are recorded using an Epic 2000 electroretinograph according to Sierra's SOPs and the study-specific SOP, including the use of the Ganzfield apparatus, at prestudy and in the end of week 3. The tabulated ERG data are evaluated by a veterinary ophthalmologist.

C) Efficacy of Combination Therapy of RTP801L siRNA and Anti-VEGF Antibody

[0462] The efficacy of combination therapy of RTP801L siRNA and anti-VEGF antibody or aptamer (such as macugen) in the treatment of diseases in which CNV occurs is tested in the above mouse CNV model.

A) CNV volume studies: The volume of choroidal neovascularization (CNV) 3 weeks after laser injury is computed byconfocal fluorescence microscopy as previously described (Sakurai et al. IOVS 2003; 44: 3578-85 & Sakurai et al. IOVS 2003; 44: 2743-2749).

### B) CNV Leakage Studies

### Experiment 1

[0463] This experiment was designed in order to identify a potential additive or synergistic therapeutic effect of inhibition of VEGF and RTP801L in the model of laser-induced choroid neovascularization in mice

[0464] Materials: Chemically modified RTP801L siRNA; negative control siRNA (GFP or scrambled); Anti-VEGF antibodies or Macugen™ and negative control.

[0465] CNV is induced on day zero as described above; the test material is injected to the subjects on day zero and day 7.

[0466] The results are evaluated by Fluorescein angiography on weeks 1, 2, 3, and by CNV volume measurement on week 3.

### Experimental Groups:

[0467] VEGF Ab or macugen 0.5 ng/eye
VEGF Ab or macugen 1 ng/eye
VEGF Ab or macugen 2 ng/eye
VEGF Ab 4 or macugen ng/eye
RTP801L siRNA 0.05 ug/eye
RTP801L siRNA 0.1 ug/eye
RTP801L siRNA 0.25 ug/eye
RTP801L siRNA 0.05 ug/eye+VEGF Ab or macugen 1 ng/eye
RTP801L siRNA 0.1 ug/eye+VEGF Ab or macugen 1 ng/eye
RTP801L siRNA 0.25 ug/eye+VEGF Ab or macugen 1 ng/eye

### Control Groups:

### PBS

[0468] Non-specific IgG 2 ng/eye
negative control 0.1 ug/eye
negative control 0.1 ug/eye+VEGF Ab or macugen 1 ng/eye

[0469] The results show an additive or synergistic therapeutic effect of inhibition of VEGF and RTP801L

### Experiment 2

[0470] This experiment was designed in order to study the effect of RTP801L siRNA on gene expression in RPE and neural retina.

### Experimental Design

### Groups:

### PBS

[0471] RTP801L siRNA 0.25 mg

[0472] CNV is induced by laser treatment as described above on day zero; the test material is also injected on day zero, and the effect evaluated by qPCR analysis of gene expression in RPE and neural retina on days zero and 5.

[0473] Additional AMD models which are used to test the methods of the present invention:

[0474] Ccl-2 or Ccr-2 deficient animals—deficiency in either of these proteins causes the development of some of the main features of AMD. Animals deficient in these proteins can be used to test the methods of the present invention.

[0475] For further information on AMD animal models, see: Chader, Vision research 42 (2002) 393-399; Ambati et al., Nature Medicine 9(11) (2003) 1390-1397; Tolentino et al., Retina 24 (2004) 132-138.

### Example 3

### Models and Results Relating to COPD and Emphysema

[0476] The compounds of the present invention are tested in the following an animal models and are shown to prevent emphysema:
[0477] Cigarette smoke-induced emphysema model: chronic exposure to cigarette smoke causes emphysema in several animals such as, inter alia, mouse, guinea pig.
[0478] Lung protease activity as a trigger of emphysema.
[0479] VEGFR inhibition model of emphysema.
[0480] Bronchial instillation with human neutrophil/pancreatic elastase in rodents.
[0481] MMP (matrix metalloprotease)-induced enphysema.
[0482] Inflammation-induced emphysema.

[0483] Additionally, emphysema models are generated through genetic means (e.g., mice carrying the TSK mutation), and emphysematous animals may be generated by known modifiers of susceptibility to emphysema such as, inter alia, lung injury, alveolar hypoplasia, hyperoxia, glucocorticoid treatment and nutrition.

[0484] Evaluation of the influence of lack of RTP801L on disease progression in mouse models of emphysema by inhibiting endogenous RTP801L employing intralung delivery RTP801L-inactivating siRNA

[0485] CS-induced inflammation is induced by 7 day smoking in 2 groups of C57BL6 mice, 10 mice per group. Group 1: CS+delivery of control siRNA; Group 2: CS+RTP801L siRNA. Control groups of mice are instilled with either type of siRNA but kept in room air conditions. The lungs are subsequently agarose-inflated, fixed and imbedded in paraffin, and development oxidative stress in the KO mice is assessed by:
[0486] a) immunohistochemical localization and quantitation of 8-oxo-dG in the lung sections;
[0487] b) immunohistochemical localization and quantitation of active caspase 3 in the lung sections using specific antibodies, or quantitative evaluation of the number of TUNEL-positive cells;
[0488] c) measurement of ceramide concentration in the lung extracts;
[0489] d) measurement of caspase activity in the lung extracts.

### Methods

### Exposure to Cigarette Smoking (CS)

[0490] Exposure is carried out (7 h/day, 7 days/week) by burning 2R4F reference cigarettes (2.45 mg nicotine per cigarette; purchased from the Tobacco Research Institute, University of Kentucky, Lexington, Ky., USA) using a smoking machine (Model TE-10, Teague Enterprises, Davis, Calif., USA). Each smoldering cigarette is puffed for 2 s, once every minute for a total of eight puffs, at a flow rate of 1.05 L/min, to provide a standard puff of 35 cm3. The smoke machine is adjusted to produce a mixture of sidestream smoke (89%) and mainstream smoke (11%) by burning five cigarettes at one time. Chamber atmosphere is monitored for total suspended particulates and carbon monoxide, with concentrations of 90 mg/m3 and 350 ppm, respectively.

### Morphologic and Morphometric Analyses

[0491] After exposing the mice to CS or instillation of chemically modified RTP801L the mice are anesthetized with halothane and the lungs are inflated with 0.5% low-melting agarose at a constant pressure of 25 cm as previously described. The inflated lungs are fixed in 10% buffered formalin and embedded in paraffin. Sections (5 μm) are stained with hematoxylin and eosin. Mean alveolar diameter, alveolar length, and mean linear intercepts are determined by computer-assisted morphometry with the Image Pro Plus software (Media Cybernetics, Silver Spring, Md., USA). The lung sections in each group are coded and representative images (15 per lung section) are acquired by an investigator masked to the identity of the slides, with a Nikon E800 microscope, 20× lens. The results show that siRNA to 801L prevents emphysema caused by smoking as measured by the four parameters described above.

### Bronchoalveolar Lavage (BAL) and Phenotyping

[0492] Following exposure to CS or instillation of chemically modified RTP801L, the mice are anesthetized with sodium pentobarbital. The BAL fluid collected from the lungs of the mice is centrifuged (500 ′g at 4° C.), and the cell pellet is resuspended in phosphate-buffered saline. The total number of cells in the lavage fluid is determined, and 2×10⁴ cells are cytocentrifuged (Shandon Southern Products, Pittsburgh, Pa., USA) onto glass slides and stained with Wright-Giemsa stain. Differential cell counts are performed on 300 cells, according to standard cytologic techniques.

### Identification of Alveolar Apoptotic Cell Populations in the Lungs.

[0493] To identify the different alveolar cell types undergoing apoptosis in the lungs, an immunohistochemical staining of active caspase 3 is performed in the lung sections from the room air (RA) as well as CS exposed mice. To identify the apoptotic type II epithelial cells in the lungs, after active caspase 3 labeling, the lung sections are incubated first with anti-mouse surfactant protein C (SpC) antibody and then with an anti-rabbit Texas red antibody. Apoptotic endothelial cells are identified by incubating the sections first with the anti-mouse CD 31 antibody and then with the biotinylated rabbit anti-mouse secondary antibody. The lung sections are rinsed in PBS and then incubated with the streptavidin-Texas red conjugated complex. The apoptotic macrophages in the lungs are identified by incubating the sections first with the rat anti-mouse Mac-3 antibody and then with the anti-rat Texas red antibody. Finally, DAPI is applied to all lung sections, incubated for 5 minutes, washed and mounted with Vectashield HardSet mounting medium. DAPI and fluorescein are visualized at 330-380 nm and 465-495 nm, respectively. Images of the lung sections are acquired with the Nikon E800 microscope, 40× lens.

### Immunohistochemical Localization of Active Caspase-3

[0494] Immunohistochemical staining of active caspase-3 assay is performed using anti-active caspase-3 antibody and the active caspase-3-positive cells are counted with a macro, using Image Pro Plus program. The counts are normalized by the sum of the alveolar profiles herein named as alveolar length and expressed in μm. Alveolar length correlates inversely with mean linear intercept, i.e., as the alveolar septa are destroyed, mean linear intercepts increases as total alveolar length, i.e., total alveolar septal length decreases.

### Caspase 3 Activity Assay

[0495] The caspase-3/7 activity is measured in lung tissue extracts using a fluorometric assay according to the manufacturer's instructions. Snap-frozen lung tissue (n=3 per group) was homogenized with the assay buffer, followed by sonication and centrifugation at 800×g. After removal of nuclei and cellular debris, the supernatant (300 μg protein) is then incubated with the pro-fluorescent substrate at room temperature for 1 h and the fluorescence intensity was measured utilizing a Typhoon phosphoimager (Amersham Biosciences, Inc., Piscataway, N.J., USA). The results are expressed as the rate of specific caspase-3 substrate cleavage, expressed in units of caspase 3 enzymatic activity, normalized by total protein concentration. Active recombinant caspase 3 was utilized as the assay standard (0-4 U). Tissue lysates without substrate, assay buffer alone, and lysates with caspase 3 inhibitor were utilized as negative controls.

Immunohistochemical Localization of 8-oxo-dG

[0496] For the immunohistochemical localization and quantification of 8-oxo-dG, lung sections from the mice exposed to CS or instilled with chemically modified RTP801L are incubated with anti-8-oxo-dG antibody and stained using InnoGenex™ Iso-IHC DAB kit using mouse antibodies. The 8-oxo-dG-positive cells are counted with a macro (using Image Pro Plus), and the counts were normalized by alveolar length as described.

Instillation of siRNA into Mouse Lungs

[0497] Chemically modified RTP801L (50 ug) is delivered in 80 ul sterile perfluorocarbon. The oxygen carrying properties of perfluorocarbon make it well-tolerated at these volumes, while its physical-chemical properties allow for extremely efficient distal lung delivery when instilled intratracheally. Mice are anesthetized by brief inhalational halothane exposure, the tongue is gently pulled forward by forceps and the trachea instilled with perfluorocarbon solution applied at the base of the tongue via a blunt angiocatheter.

[0498] Mice are anesthetized with an intra-peritoneal injection of Ketamine/Xylazine (115/22 mg/kg). 50 μg of siRNA is instilled intranasally in 50 μl volume of 0.9% NaCl by delivering five consecutive 10 μl portions. At the end of the intranasal instillation, the mouse's head is held straight up for 1 minute to ensure that all the instilled solution drains inside.

[0499] For further information, see: Rangasamy T, et al., 2004. J.C.I. 114(9):1248-59; Kasahara, Y et al., Am J Respir Crit Care Med Vol 163. pp 737-744, 2001; Kasahara, Y et al., 2000. J. Clin. Invest. 106:1311-1319; and Tuder, R M et al., Pulmonary Pharmacology & Therpaeutics 2002.

### Example 4

### Models and Results Relating to Microvascular Disorders

[0500] The compounds of the present invention are tested in animal models of a range of microvascular disorders as described below.

### 1. Diabetic Retinopathy

[0501] RTP801L promotes neuronal cell apoptosis and generation of reactive oxygen species in vitro. Experiment 1: Diabetes is induced in 8 wk old RTP801L KO and C57/129sv wildtype (WT) littermate mice by intraperitoneal injection of STZ. After 4 weeks, ERG (single white flash, 1.4×10̂4 ftc, 5 ms) is obtained from the left eye after 1 hour of dark adaptation. RVP is assessed from both eyes using the Evans-blue albumin permeation technique.

[0502] Experiment 2: Diabetes is induced in RTP801L knockout and in control wild type mice with the matched genetic background. In addition, it is induced in C57Bl6 mice, which are subsequently used for intravitreal injection of anti-RTP801L and control siRNAs. For diabetes induction, the mice are injected with streptozotocin (STZ 90 mg/kg/d for 2 days after overnight fast). Animal physiology is monitored throughout the study for changes in blood glucose, body weight, and hematocrit. Vehicle-injected mice serve as controls. The appropriate animals are treated by intravitreal injections of 1 ug of RTP801L siRNA or 1 ug of GFP control siRNA. siRNA is injected twice in the course of the study—on day 0, when the first STZ injection is performed, and on day 14 after the STZ injection.

[0503] Retinal vascular leakage is measured using the Evans-blue (EB) dye technique on the animals after 4 weeks duration of diabetes. Mice have a catheter implanted into the right jugular vein 24 hours prior to Evans Blue (EB) measurements. Retinal permeability measurements in both eyes of each animal follows a standard Evans-blue protocol.

### 2. Retinopathy of Prematurity

[0504] Retinopathy of prematurity is induced by exposing the test animals to hypoxic and hyperoxic conditions, and subsequently testing the effects on the retina.

### 3. Myocardial Infarction

[0505] Myocardial infarction is induced by Left Anterior Descending artery ligation in mice, both short term and long term.

### 4. Microvascular Ischemic Conditions

[0506] Animal models for assessing ischemic conditions include:
[0507] 1. Closed Head Injury (CHI)—Experimental TBI produces a series of events contributing to neurological and neurometabolic cascades, which are related to the degree and extent of behavioral deficits. CHI is induced under anesthesia, while a weight is allowed to free-fall from a prefixed height (Chen et al, J. Neurotrauma 13, 557, 1996) over the exposed skull covering the left hemisphere in the midcoronal plane.
[0508] 2. Transient middle cerebral artery occlusion (MCAO)— a 90 to 120 minutes transient focal ischemia is performed in adult, male Sprague Dawley rats, 300-370 gr. The method employed is the intraluminal suture MCAO (Longa et al., Stroke, 30, 84, 1989, and Dogan et al., J. Neurochem. 72, 765, 1999). Briefly, under halothane anesthesia, a 3-O-nylon suture material coated with Poly-L-Lysine is inserted into the right internal carotid artery (ICA) through a hole in the external carotid artery. The nylon thread is pushed into the ICA to the right MCA origin (20-23 mm). 90-120 minutes later the thread is pulled off, the animal is closed and allowed to recover.
[0509] 3. Permanent middle cerebral artery occlusion (MCAO)—occlusion is permanent, unilateral-induced by electrocoagulation of MCA. Both methods lead to focal brain ischemia of the ipsilateral side of the brain cortex leaving the contralateral side intact (control). The left MCA is exposed via a temporal craniectomy, as described for rats by Tamura A., et al., J Cereb Blood Flow Metab. 1981; 1:53-60. The MCA and its lenticulostriatal branch are occluded proximally to the medial border of the olfactory tract with microbipolar coagulation. The wound is sutured, and animals returned to their home cage in a room warmed at 26° C. to 28° C. The temperature of the animals is maintained all the time with an automatic thermostat.

### 5. Acute Renal Failure (ARF)

[0510] Testing active siRNA for treating ARF is done using sepsis-induced ARF or ischemia-reperfusion-induced ARF.

### 1. Sepsis Induced ARF

[0511] Two predictive animal models of sepsis-induced ARF are described by Miyaji T, et al., Kidney Int. 64(5):1620-31. These two models are lipopolysaccharide administration and cecal ligation puncture in mice, preferably in aged mice.

### 2. Ischemia-Reperfusion-Induced ARF

[0512] This predictive animal model is described by Kelly K J, et al., 2003. J Am Soc Nephrol.; 14(1):128-38.

[0513] Ischemia-reperfusion injury is induced in rats following 45 minutes bilateral kidney arterial clamp and subsequent release of the clamp to allow 24 hours of reperfusion. RTP801L siRNA or GFP siRNA (negative control) are injected into the jugular vein 2 hrs prior to and 30 minutes following the clamp. Additional siRNA is given via the tail vein at 4 and 8 hrs after the clamp. ARF progression is monitored by measurement of serum creatinine levels before and 24 hrs post surgery. At the end of the experiment, the rats are perfused via an indwelling femoral line with warm PBS followed by 4% paraformaldehyde. The left kidneys are removed and stored in 4% paraformaldehyde for subsequent histological analysis. Acute renal failure is frequently defined as an acute increase of the serum creatinine level from baseline. An increase of at least 0.5 mg per dL or 44.2 μmol per L of serum creatinine is considered as an indication for acute renal failure. Serum creatinine is measured at time zero before the surgery and at 24 hours post ARF surgery. siRNA to 801L prevents production of ARF in this model.

[0514] To study the distribution of siRNA in the rat kidney, Cy3-labeled 19-mer blunt-ended siRNA molecules (2 mg/kg) having alternating O-methyl modification in the sugar residues were administered iv for 3-5 min, after which in vivo imaging was conducted using two-photon confocal microscopy. The confocal microscopy analysis revealed that the majority of siRNA in the kidneys is concentrated in the endosomal compartment of proximal tubular cells. Both endosomal and cytoplasmic siRNA fluorescence were relatively stable during the first 2 hrs post delivery and disappeared at 24 hrs.

[0515] The expression of RTP801L during ischemia-reperfusion induced ARF was examined in rat kidneys. In both kidney regions, cortex and medulla, RTP801L transcript level is decreased in the ARF-10 hr group relative to the control group transcript level. RTP801L transcript level is also elevated (up-regulated) in the kidney medulla, 3 and 6 hrs following the ARF operation (bilateral renal artery clamp).

### Example 5

### Selection and Preparation of siRNAs

[0516] Using proprietary algorithms and the known sequence of the mRNA of gene RTP801L (SEQ ID NO:1), the sequences of many potential siRNAs were generated. siRNA molecules according to the above specifications were prepared essentially as described herein.

[0517] The siRNAs of the present invention can be synthesized by any of the methods which are well-known in the art for synthesis of ribonucleic (or deoxyribonucleic) oligonucleotides. For example, a commercially available machine (available, inter alia, from Applied Biosystems) can be used; the oligonucleotides are prepared according to the sequences disclosed herein. Overlapping pairs of chemically synthesized fragments can be ligated using methods well known in the art (e.g., see U.S. Pat. No. 6,121,426). The strands are synthesized separately and then are annealed to each other in the tube. Then, the double-stranded siRNAs are separated from the single-stranded oligonucleotides that were not annealed (e.g. because of the excess of one of them) by HPLC. In relation to the siRNAs or siRNA fragments of the present invention, two or more such sequences can be synthesized and linked together for use in the present invention.

[0518] The siRNA molecules of the invention are synthesized by procedures known in the art e.g. the procedures as described in Usman et al., 1987, J. Am. Chem. Soc., 109, 7845; Scaringe et al., 1990, Nucleic Acids Res., 18, 5433; Wincott et al., 1995, Nucleic Acids Res. 23, 2677-2684; and Wincott et al., 1997, Methods Mol. Bio., 74, 59, and may make use of common nucleic acid protecting and coupling groups, such as dimethoxytrityl at the 5′-end, and phosphoramidites at the 3′-end. The modified (e.g. 2′-O-methylated) nucleotides and unmodified nucleotides are incorporated as desired.

[0519] Alternatively, the nucleic acid molecules of the present invention can be synthesized separately and joined together post-synthetically, for example, by ligation (Moore et al., 1992, Science 256, 9923; Draper et al., International PCT publication No. WO93/23569; Shabarova et al., 1991, Nucleic Acids Research 19, 4247; Bellon et al., 1997, Nucleosides & Nucleotides, 16, 951; Bellon et al., 1997, Bioconjugate Chem. 8, 204), or by hybridization following synthesis and/or deprotection.

[0520] The siRNA molecules of the invention can also be synthesized via a tandem synthesis methodology, as described in US patent application publication No. US2004/0019001 (McSwiggen) wherein both siRNA strands are synthesized as a single contiguous oligonucleotide fragment or strand separated by a cleavable linker which is subsequently cleaved to provide separate siRNA fragments or strands that hybridize and permit purification of the siRNA duplex. The linker can be a polynucleotide linker or a non-nucleotide linker. Note that in the attached Table A, the sense and antisense strands of siRNAs have SEQ ID NOS: 2-1851.

[0521] Similarly, the sense and antisense strands of the siRNAs in attached tables B-F have SEQ ID NOS:1852-6927.

[0522] Further note that the coding region of gene RTP801L, as presented in FIG. 1, is between nucleotides 204-785. Therefore, any siRNA within this region targets the coding region of RTP801L, and any siRNA outside this region targets the non-coding region of RTP801L i.e. the 5′UTR or the 3′ UTR. The exact region targeted by each siRNA is given in the above Tables.

[0523] Additionally, sequences presented in the Tables are depicted in the 5′ to 3′ direction.

### Example 6

### Pharmacology and Drug Delivery

[0524] The compounds or pharmaceutical compositions of the present invention are administered and dosed in accordance with good medical practice, taking into account the clinical condition of the individual patient, the disease to be treated, the site and method of administration, scheduling of administration, patient age, sex, body weight and other factors known to medical practitioners.

[0525] The pharmaceutically “effective amount” for purposes herein is thus determined by such considerations as are known in the art. The amount must be effective to achieve improvement including but not limited to improved survival rate or more rapid recovery, or improvement or elimination of symptoms and other indicators as are selected as appropriate measures by those skilled in the art.

[0526] The treatment generally has a length proportional to the length of the disease process and drug effectiveness and the patient species being treated. It is noted that humans are treated generally longer than the mice or other experimental animals exemplified herein.

[0527] The compounds of the present invention are administered by any of the conventional routes of administration. It should be noted that the compound can be administered as the compound or as pharmaceutically acceptable salt and can be administered alone or as an active ingredient in combination with pharmaceutically acceptable carriers, solvents, diluents, excipients, adjuvants and vehicles. The compounds can be administered orally, subcutaneously or parenterally including intravenous, intraarterial, intramuscular, intraperitoneally, and intranasal administration as well as intrathecal and infusion techniques. Implants of the compounds are also useful. Liquid forms are prepared for injection, the term including subcutaneous, transdermal, intravenous, intramuscular, intrathecal, and other parental routes of administration. The liquid compositions include aqueous solutions, with and without organic cosolvents, aqueous or oil suspensions, emulsions with edible oils, as well as similar pharmaceutical vehicles. In addition, under certain circumstances the compositions for use in the novel treatments of the present invention are formed as aerosols, for intranasal and like administration. The patient being treated is a warm-blooded animal and, in particular, mammals including man. The pharmaceutically acceptable carriers, solvents, diluents, excipients, adjuvants and vehicles as well as implant carriers generally refer to inert, non-toxic solid or liquid fillers, diluents or encapsulating material not reacting with the active ingredients of the invention.

[0528] When administering the compound of the present invention parenterally, it is generally formulated in a unit dosage injectable form (solution, suspension, emulsion). The pharmaceutical formulations suitable for injection include sterile aqueous solutions or dispersions and sterile powders for reconstitution into sterile injectable solutions or dispersions. The carrier can be a solvent or dispersing medium containing, for example, water, ethanol, polyol (for example, glycerol, propylene glycol, liquid polyethylene glycol, and the like), suitable mixtures thereof, and vegetable oils.

[0529] Proper fluidity can be maintained, for example, by the use of a coating such as lecithin, by the maintenance of the required particle size in the case of dispersion and by the use of surfactants. Nonaqueous vehicles such a cottonseed oil, sesame oil, olive oil, soybean oil, corn oil, sunflower oil, or peanut oil and esters, such as isopropyl myristate, can also be used as solvent systems for compound compositions. Additionally, various additives which enhance the stability, sterility, and isotonicity of the compositions, including antimicrobial preservatives, antioxidants, chelating agents, and buffers, can be added. Prevention of the action of microorganisms can be ensured by various antibacterial and antifungal agents, for example, parabens, chlorobutanol, phenol, sorbic acid, and the like. In many cases, it is desirable to include isotonic agents, for example, sugars, sodium chloride, and the like. Prolonged absorption of the injectable pharmaceutical form can be brought about by the use of agents delaying absorption, for example, aluminum monostearate and gelatin. According to the present invention, however, any vehicle, diluent, or additive used have to be compatible with the compounds.

[0530] Sterile injectable solutions can be prepared by incorporating the compounds utilized in practicing the present invention in the required amount of the appropriate solvent with various of the other ingredients, as desired.

[0531] A pharmacological formulation of the present invention can be administered to the patient in an injectable formulation containing any compatible carrier, such as various vehicle, adjuvants, additives, and diluents; or the compounds utilized in the present invention can be administered parenterally to the patient in the form of slow-release subcutaneous implants or targeted delivery systems such as monoclonal antibodies, vectored delivery, iontophoretic, polymer matrices, liposomes, and microspheres. Examples of delivery systems useful in the present invention include U.S. Pat. Nos. 5,225,182; 5,169,383; 5,167,616; 4,959,217; 4,925,678; 4,487,603; 4,486,194; 4,447,233; 4,447,224; 4,439,196; and 4,475,196. Many other such implants, delivery systems, and modules are well known to those skilled in the art.

[0532] A pharmacological formulation of the compound utilized in the present invention can be administered orally to the patient. Conventional methods such as administering the compound in tablets, suspensions, solutions, emulsions, capsules, powders, syrups and the like are usable. Known techniques which deliver it orally or intravenously and retain the biological activity are preferred. In one embodiment, the compound of the present invention can be administered initially by intravenous injection to bring blood levels to a suitable level. The patient's levels are then maintained by an oral dosage form, although other forms of administration, dependent upon the patient's condition and as indicated above, can be used.

[0533] In general, the active dose of compound for humans is in the range of from 1 ng/kg to about 20-100 mg/kg body weight per day, preferably about 0.01 mg to about 2-10 mg/kg body weight per day, in a regimen of one dose per day or twice or three or more times per day for a period of 1-2 weeks or longer, preferably for 24- to 48 hrs or by continuous infusion during a period of 1-2 weeks or longer.

### Administration of Compounds of the Present Invention to the Eye

[0534] The compounds of the present invention can be administered to the eye topically or in the form of an injection, such as an intravitreal injection, a sub-retinal injection or a bilateral injection. Preferred methods of delivery to the eye is using siRNA formulated as eye drops.

[0535] Further information on administration of the compounds of the present invention can be found in Tolentino et al., Retina 24 (2004) 132-138; Reich et al., Molecular vision 9 (2003) 210-216.

### Pulmonary Administration of Compounds of the Present Invention

[0536] The therapeutic compositions of the present invention are preferably administered into the lung by inhalation of an aerosol containing these compositions/compounds, or by intranasal or intratracheal instillation of said compositions. Formulating the compositions in liposomes may benefit absorption. Additionally, the compositions may include a PFC liquid such as perflubron, and the compositions formulated as a complex of the compounds of the invention with polyethylemeimine (PEI).

[0537] For further information on pulmonary delivery of pharmaceutical compositions see Weiss et al., Human gene therapy 10:2287-2293 (1999); Densmore et al., Molecular therapy 1:180-188 (1999); Gautam et al., Molecular therapy 3:551-556 (2001); and Shahiwala & Misra, AAPS PharmSciTech 5 (2004). Additionally, respiratory formulations for siRNA are described in U.S. patent application No. 2004/0063654 of Davis et el.

[0538] Further, the compounds of the present invention are administered topically where appropriate (such as in the case of diabetic foot ulcers for example), optionally in a lipid/liposome formulation, or for use in iontophoresis.

[0539] A preferred administration mode is topical delivery of the RTP801L inhibitors onto the round window membrane of the cochlea as disclosed for example in Tanaka et al. (Hear Res. 2003; 177(1-2):21-31). Preferred delivery to the inner ear comprising administering the siRNA as an ear drop formulation.

[0540] In the treatment of pressure sores or other wounds, the administration of the pharmaceutical composition is preferably by topical application to the damages area, but the compositions may also be administered systemically.

[0541] Additional formulations for improved delivery of the compounds of the present invention can include non-formulated compounds, compounds covalently bound to cholesterol, and compounds bound to targeting antibodies (Song et al., 2005. Nat. Biotechnol. 23(6):709-17).

### Example 7

### Model Systems for Pressure Sores or Pressure Ulcers

[0542] Pressure sores or pressure ulcers including diabetic ulcers, are areas of damaged skin and tissue that develop when sustained pressure (usually from a bed or wheelchair) cuts off circulation to vulnerable parts of the body, especially the skin on the buttocks, hips and heels. The lack of adequate blood flow leads to ischemic necrosis and ulceration of the affected tissue. Pressure sores occur most often in patients with diminished or absent sensation or who are debilitated, emaciated, paralyzed, or long bedridden. Tissues over the sacrum, ischia, greater trochanters, external malleoli, and heels are especially susceptible; other sites may be involved depending on the patient's situation.

[0543] Testing the active inhibitors of the invention (such as siRNA) for treating pressure sore, ulcers and similar wounds is done in the mouse model described in Reid R R, et al., J Surgical Research. 116: 172-180, 2004.

[0544] Additionally, a rabbit model is described by Mustoe et al, JCI, 1991; Alm & Mustoe, Ann Pl Surg, 1991 and is used for testing the siRNAs of the invention.

### Example 8

### Model Systems for Spinal Cord Injury

[0545] Spinal cord injury, or myelopathy, is a disturbance of the spinal cord that results in loss of sensation and/or mobility. The two common types of spinal cord injury are due to trauma and disease. Traumatic injury can be due to automobile accidents, falls, gunshot, diving accidents inter alia, and diseases which can affect the spinal cord include polio, spina bifida, tumors and Friedreich's ataxia.

[0546] Testing the active inhibitors of the invention (such as siRNA) for treating spinal cord injury is done in the rat spinal cord contusion model as described by Young, W. in Prog Brain Res. 2002; 137:231-55. Other predictive animal models of spinal cord injury are described in the following references: Gruner, J A 1992. J Neurotrauma 9(2): 123; Hasegawa, K. and M. Grumet 2003. J Neurosurg 98(5): 1065-71; and Huang, P P and W. Young (1994). J Neurotrauma 11(5): 547.

### Example 9

### Model Systems for Glaucoma

[0547] Testing the active inhibitors of the invention (such as siRNA) for treating or preventing Glaucoma is done in the animal model for example as described by Pease et al., J. Glaucoma, 2006, 15(6):512-9 (Manometric calibration and comparison of TonoLab and TonoPen tonometers in rats with experimental glaucoma and in normal mice).

Rat Optic Nerve Crush (ONC) Model: Intravitreal siRNA Delivery and Eye Drop Delivery

[0548] For optic nerve transsection the orbital optic nerve (ON) of anesthetized rats is exposed through a supraorbital approach, the meninges severed and all axons in the ON transected by crushing with forceps for 10 seconds, 2 mm from the lamina cribrosa.

[0549] The siRNA compounds are delivered alone or in combination in 5 uL volume (10 ug/uL) as eye drops. Immediately after optic nerve crush (ONC), 20 ug/10 ul test siRNA or 10 ul PBS is administered to one or both eyes of adult Wistar rats and the levels of siRNA taken up into the dissected and snap frozen whole retinae at 5 h and 1 d, and later at 2 d, 4 d, 7 d, 14 d and 21 d post injection is determined. Similar experiments are performed in order to test activity and efficacy of siRNA administered via eye drops.

### Example 10

### Model Systems for Ischemia and Reperfusion Injury Following Lung Transplantation in Rats

[0550] Testing the active inhibitors of the invention (such as siRNA) for treating or preventing Ischemia and reperfusion injury following lung transplantation is done in the animal model for example as described by Mizobuchi et al., J. Heart Lung Transplant 2004:23:889-93.

### Example 11

### Model Systems for Acute Lung Injury (ALI)

[0551] Intratracheal (i.t) administration of LPS (Lipopolysaccharide), a bacterial cell wall component, is an accepted experimental model of acute lung injury (ALI), as LPS stimulates profound lung recruitment of inflammatory cells and the subsequent development of systemic inflammation.

[0552] (See, for example, Fang W F, et al., Am J Physiol Lung Cell Mol. Physiol. 2007 293(2):L336-44; Hagiwara S, Iwasaka H, Noguchi T. J. Anesth. 2007; 21(2):164-70).

[0553] Time-dependent changes of RTP801Lgene expression in mice lungs during the first 24 hours (time points 0.5; 1; 2; 4; 8 & 24 hours), after Intratracheal (i.t) administration of LPS was assessed. The assessment of gene expression was done using qPCR.

[0554] The results indicate that the level of the RTP801L transcript is gradually decreased following LPS instillation.

### Example 12

### Model Systems for Acute Respiratory Distress Syndrome

[0555] Testing the active inhibitors of the invention (such as siRNA) for treating Acute respiratory distress syndrome is performed, inter alia, in the animal model as described by Chen et al. in J Biomed Sci. 2003; 10(6 Pt 1):588-92.

### Example 13

### Model Systems for Hearing Loss Conditions

### (i) Animal Model of Carboplatin-Induced or Cisplatin-Induced Hair Cell Death in the Cochlea of Chinchilla:

[0556] Chinchillas are pre-treated by direct administration of specific siRNAs to RTP801L in saline to the left ear of each animal. Saline is given to the right ear of each animal as placebo. Two days following the administration of the specific siRNA, the animals are treated with carboplatin (75 mg/kg ip) or cisplatin (intraperitoneal infusion of 13 mg/kg over 30 minutes). After sacrifice of the chinchillas (two weeks post carboplatin treatment) the percentage of dead cells of inner hair cells (IHC) and outer hair cells (OHC) is calculated in the left ear (siRNA treated) and in the right ear (saline treated). The percentage of dead cells is lower in the siRNA treated ear than in the control

### (ii) Animal Model of Acoustic-Induced Hair Cell Death in the Cochlea of Chinchilla:

[0557] The activity of specific siRNA to RTP801L (e.g. chemically modified siRNA Nos: 72 or 73 in Table A) in an acoustic trauma model is studied in chinchilla. The animals are exposed to an octave band of noise centered at 4 kHz for 2.5 h at 105 dB. The left ear of the noise-exposed chinchillas is pre-treated (48 h before the acoustic trauma) with 30 μg of either siRNA in ˜10 μL of saline; the right ear is pre-treated with vehicle (saline). The compound action potential (CAP) is a convenient and reliable electrophysiological method for measuring the neural activity transmitted from the cochlea. The CAP is recorded by placing an electrode near the base of the cochlea in order to detect the local field potential that is generated when a sound stimulus, such as click or tone burst, is abruptly turned on. The functional status of each ear is assessed 2.5 weeks after the acoustic trauma. Specifically, the mean threshold of the compound action potential recorded from the round window is determined 2.5 weeks after the acoustic trauma in order to determine if the thresholds in the siRNA-treated ear are lower (better) than the untreated (saline) ear. In addition, the amount of inner and outer hair cell loss is determined in the siRNA-treated and the control ear. It is found that the thresholds in the siRNA-treated ear are lower than the untreated (saline) ear. Also, the amount of hair cell loss is lower in the siRNA-treated ear than in the control ear.

### Example 14

### RTP801L siRNA Structures and Activity

[0558] In addition to Example 1 the siRNA compounds of the present invention are tested in the following model. The following negative controls were used:

a) Cy3-labeled synthetic stabilized siRNA against human, mouse and rat PTEN gene (PTEN-Cy3). Stock solution 20 mg/ml in double distilled.
b) Synthetic stabilized siRNA against GFP (GFP siRNA). Stock solution 20 mg/ml in double distilled.

[0559] The cells used in the experiment were 801 wt and Ko mouse embryonic fibroblasts (MEF) cells and 293T embryonic kidney cells.

[0560] The transfection reagent used was Lipofectamine™ 2000 (Invitrogene, Cat#11668-019).

[0561] Methods: 3×10⁵ and 1×10⁵ 801 wt MEF and 293T cells were seeded per well of the 6 wells plate, respectively. 24 h subsequently, cells were transfected with:

RTP801L siRNA molecules at final concentrations per well of 0.5-40 nM
GFP siRNA molecules at final concentrations per well of 0.5-40 nM
PTEN-Cy₃ siRNA at final concentrations per well of 20-40 nM

[0562] Transfection mixture per each well contained 3 ul lipofectamine 2000 reagent (in 250 ul serum free medium).

[0563] RNA was extracted from cells 72 h following transfection. In the last 8 h of incubation, 500 uM H₂O₂ was added to wt MEF cells.

[0564] RNA was prepared from the cells and processed, and qPCR was performed for the evaluation of RTP801L mRNA levels, using mouse or human RTP801L-specific oligonucleotides and Cyclophylin as a reference gene.

TABLE A
19 mer

| | | | | Hum 34222182 | Mouse | | | |
|---|---|---|---|---|---|---|---|---|
| No | Sp-Source | Sense siRNA | AntiSense siRNA | cds = 204-785 | 31541838 | rat 62644440 | chimp 55622975 | dog 74002279 |
| 1 | Hum | GCCAGUGUUCUAACAAACU | AGUUUGUUAGAACACUGGC | [2242-2260] | — | — | — | — |
| 2 | Hum | UAGCCAGUGUUCUAACAAA | UUUGUUAGAACACUGGCUA | [2240-2258] | — | — | — | — |
| 3 | Hum | GUGACUUCCUCACUCUAAU | AUUAGAGUGAGGAAGUCAC | [1385-1403] | — | — | — | — |
| 4 | Hum | AGCCAGUGUUCUAACAAAC | GUUUGUUAGAACACUGGCU | [2241-2259] | — | — | — | — |
| 5 | Hum | GAGUGAAUGAUGAAUACCU | AGGUAUUCAUCAUUCACUC | [1577-1595] | — | — | — | — |
| 6 | Hum | GACUUCCUCACUCUAAUGU | ACAUUAGAGUGAGGAAGUC | [1387-1405] | — | — | — | — |
| 7 | Hum | GUUCUAACAAACUAAACUC | GAGUUUAGUUUGUUAGAAC | [2248-2266] | — | — | [531-541](11/11) | — |
| 8 | Hum | GAAUGAUGAAUACCUGUGA | UCACAGGUAUUCAUCAUUC | [1581-1599] | — | — | — | — |
| 9 | Hum | UCCUCACUCUAAUGUUUUA | UAAAACAUUAGAGUGAGGA | [1391-1409] | — | — | — | — |
| 10 | Hum, ms, | GCCAGAAUUUGGUUAAAAU | AUUUUAACCAAAUUCUGGC | [364-382] | [362-380] | [243-261] | [484-502] | — |
| | rat, chimp | | | | | | | |
| 11 | Hum | ACGGGUCAAUUUACGAAGU | ACUUCGUAAAUUGACCCGU | [1809-1827] | — | — | — | — |
| 12 | Hum | UCCAUUGAGUGAAUGAUGA | UCAUCAUUCACUCAAUGGA | [1571-1589] | — | — | — | — |
| 13 | Hum | UUCCUCACUCUAAUGUUUU | AAAACAUUAGAGUGAGGAA | [1390-1408] | — | — | — | — |
| 14 | Hum | GCACCCAGAUUUUUUCCAC | GUGGAAAAAAUCUGGGUGC | [1901-1919] | — | — | — | — |
| 15 | Hum | GUGGUGCCAUUUCAGUAAC | GUUACUGAAAUGGCACCAC | [1428-1446] | — | — | — | — |
| 16 | Hum | CCUCACUCUAAUGUUUUAA | UUAAAACAUUAGAGUGAGG | [1392-1410] | — | — | — | — |
| 17 | Hum | CUUCCUCACUCUAAUGUUU | AAACAUUAGAGUGAGGAAG | [1389-1407] | — | — | — | — |
| 18 | Hum | GGCUUUUUUUUCUCUAAGU | ACUUAGAGAAAAAAAAGCC | [1153-1171] | — | — | — | — |
| 19 | Hum | UCCCAUUUUUGUACAGAAU | AUUCUGUACAAAAAUGGGA | [1005-1023] | — | — | — | — |
| 20 | Hum | GAGAAGUGAUUCAAAAUAG | CUAUUUUGAAUCACUUCUC | [967-985] | — | — | — | — |
| 21 | Hum | GGAGAAGUGAUUCAAAAUA | UAUUUUGAAUCACUUCUCC | [966-984] | — | — | — | — |
| 22 | Hum | GUCAGCUAAAGUCAUUUGU | ACAAAUGACUUUAGCUGAC | [841-859] | — | — | — | — |
| 23 | Hum, chimp | CCGGCCAGCAUUUCAGAAU | AUUCUGAAAUGCUGGCCGG | [237-255] | [235-251](17/17) | [117-132](16/16) | [357-375] | — |
| 24 | Hum, chimp, dog | AUGCUGGAGAACUGUCUGU | ACAGACAGUUCUCCAGCAU | [381-399] | [383-397](15/15) | [264-278](15/15) | [501-519] | [363-381] |
| 25 | Hum, chimp, dog | AAAUGCUGGAGAACUGUCU | AGACAGUUCUCCAGCAUUU | [379-397] | [377-395](18/19) | [258-276](18/19) | [499-517] | [361-379] |
| 26 | Hum, chimp | UGGUUAAAAUGCUGGAGAA | UUCUCCAGCAUUUUAACCA | [373-391] | [371-389](18/19) | [252-270](18/19) | [493-511] | [359-373](15/15) |
| 27 | Hum, chimp | UUGGUUAAAAUGCUGGAGA | UCUCCAGCAUUUUAACCAA | [372-390] | [370-388](18/19) | [251-269](18/19) | [492-510] | [354-372](18/19) |
| 28 | Hum | UAGCUCCACUUCACAUGCU | AGCAUGUGAAGUGGAGCUA | [2118-2136] | — | — | — | — |
| 29 | Hum | AGCCUCCACUCAACAAUGU | ACAUUGUUGAGUGGAGGCU | [2023-2041] | — | — | — | — |
| 30 | Hum | ACCCAGAUUUUUUCCACCU | AGGUGGAAAAAAUCUGGGU | [1903-1921] | — | — | — | — |
| 31 | Hum | UGCACCCAGAUUUUUUCCA | UGGAAAAAAUCUGGGUGCA | [1900-1918] | — | — | — | — |
| 32 | Hum | AAACGGGUCAAUUUACGAA | UUCGUAAAUUGACCCGUUU | [1807-1825] | — | — | — | — |
| 33 | Hum | AUGAUGAAUACCUGUGAGG | CCUCACAGGUAUUCAUCAU | [1583-1601] | — | — | — | — |
| 34 | Hum | UUGAGUGAAUGAUGAAUAC | GUAUUCAUCAUUCACUCAA | [1575-1593] | — | — | — | — |
| 35 | Hum | CGGCAAUAAUGGAACUGCU | AGCAGUUCCAUUAUUGCCG | [1353-1371] | — | — | — | — |
| 36 | Hum | GCCUAUCAAAACUUCCAAA | UUUGGAAGUUUUGAUAGGC | [1218-1236] | — | — | — | [1182-1194] |
| | | | | | | | | (13/13) |
| 37 | Hum | UGGCUUUUUUUUCUCUAAG | CUUAGAGAAAAAAAAGCCA | [1152-1170] | — | — | — | — |
| 38 | Hum | GCCCAUUUGAGUUUUACAU | AUGUAAAACUCAAAUGGGC | [1057-1075] | — | — | — | — |
| 39 | Hum, chimp | GGCCAGCAUUUCAGAAUUG | CAAUUCUGAAAUGCUGGCC | [239-257] | [237-251](15/15) | [118-132](15/15) | [359-377] | — |
| 40 | Hum, chimp | CGGCCAGCAUUUCAGAAUU | AAUUCUGAAAUGCUGGCCG | [238-256] | [236-251](16/16) | [117-132](16/16) | [358-376] | — |
| 41 | Hum | GCGUCGUACCUACUUUUGA | UCAAAAGUAGGUACGACGC | [589-607] | — | — | [711-727](16/17) | — |
| 42 | Hum | UAGCGUCGUACCUACUUUU | AAAAGUAGGUACGACGCUA | [587-605] | — | — | — | — |
| 43 | Hum, rat, dog | AUGCACGUGAACUUGGAAA | UUUCCAAGUUCACGUGCAU | [525-543] | [523-539](17/17) | [404-422] | [645-663](18/19) | [507-525] |
| 44 | Hum | UUGUCCUUUUUCCACUAAC | GUUAGUGGAAAAAGGACAA | [2441-2459] | — | — | — | — |
| 45 | Hum | GUUGUCCUUUUUCCACUAA | UUAGUGGAAAAAGGACAAC | [2440-2458] | — | — | — | — |
| 46 | Hum | CUGUUGUCCUUUUUCCACU | AGUGGAAAAAGGACAACAG | [2438-2456] | — | — | — | — |
| 47 | Hum, chimp, dog | CUGGAGAACUGUCUGUCCA | UGGACAGACAGUUCUCCAG | [384-402] | [383-400](18/18) | [264-281](18/18) | [504-522] | [366-384] |
| 48 | Hum | GCCAAUCUUUAUAGAAUUG | CAAUUCUAUAAAGAUUGGC | [2294-2312] | — | — | — | — |
| 49 | Hum | GUUCAAAUUAGCCAGUGUU | AACACUGGCUAAUUUGAAC | [2232-2250] | — | — | — | — |
| 50 | Hum, ms, | UGCCAGAAUUUGGUUAAAA | UUUUAACCAAAUUCUGGCA | [363-381] | [361-379] | [242-260] | [483-501] | — |
| | rat, chimp | | | | | | | |
| 51 | Hum | CCCAGAUUUUUUCCACCUU | AAGGUGGAAAAAAUCUGGG | [1904-1922] | — | — | — | — |
| 52 | Hum | CACCCAGAUUUUUUCCACC | GGUGGAAAAAAUCUGGGUG | [1902-1920] | — | — | — | — |
| 53 | Hum | CAAUUUACGAAGUCUGCAU | AUGCAGACUUCGUAAAUUG | [1815-1833] | — | — | — | — |
| 54 | Hum | GGGUCAAUUUACGAAGUCU | AGACUUCGUAAAUUGACCC | [1811-1829] | — | — | — | — |
| 55 | Hum | AACGGGUCAAUUUACGAAG | CUUCGUAAAUUGACCCGUU | [1808-1826] | — | — | — | — |
| 56 | Hum | UGAAACGGGUCAAUUUACG | CGUAAAUUGACCCGUUUCA | [1805-1823] | — | — | — | — |
| 57 | Hum | UGGUGCCAUUUCAGUAACC | GGUUACUGAAAUGGCACCA | [1429-1447] | — | — | — | — |
| 58 | Hum | UGGAACUGCUUCACUGUUU | AAACAGUGAAGCAGUUCCA | [1362-1380] | — | — | — | [1333-1343] |
| | | | | | | | | (11/11) |
| 59 | Hum | AAGGUAGGAUUAAGUAGGU | ACCUACUUAAUCCUACCUU | [1286-1304] | — | — | — | — |
| 60 | Hum | CAGGAAGGUAGGAUUAAGU | ACUUAAUCCUACCUUCCUG | [1282-1300] | — | — | — | — |
| 61 | Hum | AGCCUAUCAAAACUUCCAA | UUGGAAGUUUUGAUAGGCU | [1217-1235] | — | — | — | [1182-1194] |
| | | | | | | | | (13/13) |
| 62 | Hum | AACCAGAUUUGCCUAUUUU | AAAAUAGGCAAAUCUGGUU | [1123-1141] | — | — | — | — |
| 63 | Hum | GUACAGAAUUGAAUGGGAU | AUCCCAUUCAAUUCUGUAC | [1015-1033] | — | — | — | — |
| 64 | Hum | AUCCCAUUUUUGUACAGAA | UUCUGUACAAAAAUGGGAU | [1004-1022] | — | — | — | — |
| 65 | Hum | CAGCUAAAGUCAUUUGUAG | CUACAAAUGACUUUAGCUG | [843-861] | [845-856](12/12) | — | — | [834-844](11/11) |
| 66 | Hum | AUGAUUGGGUAGUAAAACU | AGUUUUACUACCCAAUCAU | [813-831] | — | — | — | — |
| 67 | Hum | AGGGUCCUAAAAAGGGAAA | UUUCCCUUUUUAGGACCCU | [776-794] | — | — | — | — |
| 68 | Hum, rat, dog | ACGUGAACUUGGAAAUUGA | UCAAUUUCCAAGUUCACGU | [529-547] | [527-545](18/19) | [408-426] | [651-667](17/17) | [511-529] |
| 69 | Hum, ms, chimp | GAAUUGCUCAAGAUGUCCU | AGGACAUCUUGAGCAAUUC | [463-481] | [461-479] | [342-360](18/19) | [583-601] | [447-463](17/17) |
| 70 | Hum, ms, chimp | GAGAAUUGCUCAAGAUGUC | GACAUCUUGAGCAAUUCUC | [461-479] | [459-477] | — | [581-599] | [447-461](15/15) |
| 71 | Hum, ms, chimp | AGAGAAUUGCUCAAGAUGU | ACAUCUUGAGCAAUUCUCU | [460-478] | [458-476] | — | [580-598] | [442-460](18/19) |
| 72 | Hum, ms, chimp | CCAGAGAAUUGCUCAAGAU | AUCUUGAGCAAUUCUCUGG | [458-476] | [456-474] | [337-355](18/19) | [578-596] | [440-458](18/19) |
| 73 | Hum, ms, chimp | CCCAGAGAAUUGCUCAAGA | UCUUGAGCAAUUCUCUGGG | [457-475] | [455-473] | [336-354](18/19) | [577-595] | [439-457](18/19) |
| 74 | Hum, chimp, dog | AACUGUCUGUCCAAAUCAA | UUGAUUUGGACAGACAGUU | [390-408] | [388-406](18/19) | [269-287](18/19) | [510-528] | [372-390] |
| 75 | Hum | UGUCCUUUUUCCACUAACA | UGUUAGUGGAAAAAGGACA | [2442-2460] | — | — | — | — |
| 76 | Hum | GAACUGUUGUCCUUUUUCC | GGAAAAAGGACAACAGUUC | [2435-2453] | — | — | — | — |
| 77 | Hum, chimp, dog | GGAGAACUGUCUGUCCAAA | UUUGGACAGACAGUUCUCC | [386-404] | [384-400](17/17) | [265-282](18/18) | [506-524] | [368-386] |
| 78 | Hum | CAGUGUUCUAACAAACUAA | UUAGUUUGUUAGAACACUG | [2244-2262] | — | — | — | — |
| 79 | Hum | AAAUUAGCCAGUGUUCUAA | UUAGAACACUGGCUAAUUU | [2236-2254] | — | — | — | — |
| 80 | Hum | GACCUAAAAUGUCACUGUU | AACAGUGACAUUUUAGGUC | [2216-2234] | — | — | — | — |
| 81 | Hum, chimp | UUGCCAGAAUUUGGUUAAA | UUUAACCAAAUUCUGGCAA | [362-380] | [361-378](18/18) | [242-259](18/18) | [482-500] | — |
| 82 | Hum | UGGAUAAGGAGCUUAUUCA | UGAAUAAGCUCCUUAUCCA | [2080-2098] | — | — | — | — |
| 83 | Hum | AGCAAGGCUUUCAUAUCCU | AGGAUAUGAAAGCCUUGCU | [2049-2067] | — | — | — | — |
| 84 | Hum | CUCCACUCAACAAUGUUCA | UGAACAUUGUUGAGUGGAG | [2026-2044] | — | — | — | — |
| 85 | Hum | UUAGCCUCCACUCAACAAU | AUUGUUGAGUGGAGGCUAA | [2021-2039] | — | — | — | — |
| 86 | Hum | AGAGAAUUUAGCCUCCACU | AGUGGAGGCUAAAUUCUCU | [2014-2032] | — | — | — | — |
| 87 | Hum | AGAUCAUUAUCUCUUUCCU | AGGAAAGAGAUAAUGAUCU | [1981-1999] | — | — | — | — |
| 88 | Hum | GGCCUUAUUUUUUGUCUUA | UAAGACAAAAAAUAAGGCC | [1950-1968] | — | — | — | — |
| 89 | Hum | CAGAUUUUUUCCACCUUGG | CCAAGGUGGAAAAAAUCUG | [1906-1924] | — | — | — | — |
| 90 | Hum | CCAGAUUUUUUCCACCUUG | CAAGGUGGAAAAAAUCUGG | [1905-1923] | — | — | — | — |
| 91 | Hum | GCCUAGAGAAUGAAACUCA | UGAGUUUCAUUCUCUAGGC | [1862-1880] | — | — | — | — |
| 92 | Hum | UACGAAGUCUGCAUUGGCU | AGCCAAUGCAGACUUCGUA | [1820-1838] | — | — | — | — |
| 93 | Hum | CGGGUCAAUUUACGAAGUC | GACUUCGUAAAUUGACCCG | [1810-1828] | — | — | — | — |
| 94 | Hum | GAAACGGGUCAAUUUACGA | UCGUAAAUUGACCCGUUUC | [1806-1824] | — | — | — | — |
| 95 | Hum | GUCCCUCUCUGAUUCACUU | AAGUGAAUCAGAGAGGGAC | [1626-1644] | [1278-1288](11/11) | — | — | — |
| 96 | Hum | GAGAGGGGACUCCUAAGAA | UUCUUAGGAGUCCCCUCUC | [78-96] | — | — | — | — |
| 97 | Hum | GAAGGUAGGAUUAAGUAGG | CCUACUUAAUCCUACCUUC | [1285-1303] | — | — | — | — |
| 98 | Hum | UAGCCUAUCAAAACUUCCA | UGGAAGUUUUGAUAGGCUA | [1216-1234] | — | — | — | [1182-1194] |
| | | | | | | | | (13/13) |
| 99 | Hum | CCAUUUUUGUACAGAAUUG | CAAUUCUGUACAAAAAUGG | [1007-1025] | — | — | — | — |
| 100 | Hum | UAGAUCCCAUUUUUGUACA | UGUACAAAAAUGGGAUCUA | [1001-1019] | — | — | — | — |
| 101 | Hum | GCAGCUAACAGGCUGAUUU | AAAUCAGCCUGUUAGCUGC | [937-955] | — | — | — | — |
| 102 | Hum | GUGUUUCACAUUCAUAGCA | UGCUAUGAAUGUGAAACAC | [915-933] | — | — | — | — |
| 103 | Hum | GUCCUAAAAAGGGAAAAUA | UAUUUUCCCUUUUUAGGAC | [779-797] | — | — | — | — |
| 104 | Hum | GGGUCCUAAAAAGGGAAAA | UUUUCCCUUUUUAGGACCC | [777-795] | — | — | — | — |
| 105 | Hum | AAGGGUCCUAAAAAGGGAA | UUCCCUUUUUAGGACCCUU | [775-793] | — | — | — | — |
| 106 | Hum | CAGGGACUUUUUCUUUAGU | ACUAAAGAAAAAGUCCCUG | [653-671] | — | — | [773-789](17/17) | — |
| 107 | Hum, rat, dog | UGCACGUGAACUUGGAAAU | AUUUCCAAGUUCACGUGCA | [526-544] | [524-539](16/16) | [405-423] | [646-664](18/19) | [508-526] |
| 108 | Hum, ms, rat, dog | GUGUUAUGCACGUGAACUU | AAGUUCACGUGCAUAACAC | [520-538] | [518-536] | [399-417] | — | [502-520] |
| 109 | Hum, ms | GUUGUGUUAUGCACGUGAA | UUCACGUGCAUAACACAAC | [517-535] | [515-533] | [398-414](17/17) | [637-655](18/19) | [501-517](17/17) |
| 110 | Hum | GAGGUUGUGUUAUGCACGU | ACGUGCAUAACACAACCUC | [514-532] | [514-530](17/17) | [398-411](14/14) | [634-649](16/16) | [496-514](18/19) |
| 111 | Hum, ms, chimp | GACCCAGAGAAUUGCUCAA | UUGAGCAAUUCUCUGGGUC | [455-473] | [453-471] | [334-348](15/15) | [575-593] | — |
| 112 | Hum, chimp | AAGCAAACUAAACUUGGUU | AACCAAGUUUAGUUUGCUU | [408-426] | — | — | [528-546] | — |
| 113 | Hum, chimp | CCAAAUCAAAGCAAACUAA | UUAGUUUGCUUUGAUUUGG | [400-418] | [402-413](12/12) | [279-294](15/16) | [520-538] | [382-397](16/16) |
| 114 | Hum | GGAAGGCUGUUAAAUUAAU | AUUAAUUUAACAGCCUUCC | [2512-2530] | — | — | — | — |
| 115 | Hum | UGCCUGUUAUGCUUACAAA | UUUGUAAGCAUAACAGGCA | [2478-2496] | — | — | — | — |
| 116 | Hum | UUGCCUGUUAUGCUUACAA | UUGUAAGCAUAACAGGCAA | [2477-2495] | — | — | — | — |
| 117 | Hum | UGACUCUCUUGCCUGUUAU | AUAACAGGCAAGAGAGUCA | [2469-2487] | — | — | — | — |
| 118 | Hum | GUCCUUUUUCCACUAACAG | CUGUUAGUGGAAAAAGGAC | [2443-2461] | — | — | — | — |
| 119 | Hum | UAGAACUGUUGUCCUUUUU | AAAAAGGACAACAGUUCUA | [2433-2451] | — | — | — | — |
| 120 | Hum | GUAGAACUGUUGUCCUUUU | AAAAGGACAACAGUUCUAC | [2432-2450] | — | — | — | — |
| 121 | Hum, chimp, dog | GAGAACUGUCUGUCCAAAU | AUUUGGACAGACAGUUCUC | [387-405] | [385-400](16/16) | [266-282](17/17) | [507-525] | [369-387] |
| 122 | Hum | GCCAAGAUAAAUCAAUGUU | AACAUUGAUUUAUCUUGGC | [2314-2332] | — | — | — | — |
| 123 | Hum | ACAAAGCCAAUCUUUAUAG | CUAUAAAGAUUGGCUUUGU | [2289-2307] | — | — | — | — |
| 124 | Hum | AUGUCACUGUUCAAAUUAG | CUAAUUUGAACAGUGACAU | [2224-2242] | — | — | — | — |
| 125 | Hum | GUGAUCCUGUUACUGAUAC | GUAUCAGUAACAGGAUCAC | [2190-2208] | — | — | — | — |
| 126 | Hum, chimp | GAAUUUGGUUAAAAUGCUG | CAGCAUUUUAACCAAAUUC | [368-386] | [366-381](16/16) | [247-262](16/16) | [488-506] | — |
| 127 | Hum | AGGCUUUCAUAUCCUUGCU | AGCAAGGAUAUGAAAGCCU | [2053-2071] | — | — | — | — |
| 128 | Hum | CAGCAAGGCUUUCAUAUCC | GGAUAUGAAAGCCUUGCUG | [2048-2066] | — | — | — | — |
| 129 | Hum | GCCUCCACUCAACAAUGUU | AACAUUGUUGAGUGGAGGC | [2024-2042] | — | — | — | — |
| 130 | Hum | GAAUUUAGCCUCCACUCAA | UUGAGUGGAGGCUAAAUUC | [2017-2035] | — | — | — | — |
| 131 | Hum | GAGAGAAUUUAGCCUCCAC | GUGGAGGCUAAAUUCUCUC | [2013-2031] | — | — | — | — |
| 132 | Hum | UAGAUCAUUAUCUCUUUCC | GGAAAGAGAUAAUGAUCUA | [1980-1998] | — | — | — | — |
| 133 | Hum | AGGCCUUAUUUUUUGUCUU | AAGACAAAAAAUAAGGCCU | [1949-1967] | — | — | — | — |
| 134 | Hum | AAGGCCUUAUUUUUUGUCU | AGACAAAAAAUAAGGCCUU | [1948-1966] | — | — | — | — |
| 135 | Hum | GCAUGCACCCAGAUUUUUU | AAAAAAUCUGGGUGCAUGC | [1897-1915] | — | — | — | — |
| 136 | Hum | GGUCAAUUUACGAAGUCUG | CAGACUUCGUAAAUUGACC | [1812-1830] | — | — | — | — |
| 137 | Hum | GGGCUUUUCUGGGAAUUGA | UCAAUUCCCAGAAAAGCCC | [1725-1743] | — | — | — | — |
| 138 | Hum | AUACCUGUGAGGAUAGGAA | UUCCUAUCCUCACAGGUAU | [1590-1608] | — | — | — | — |
| 139 | Hum | ACUCUUCCAUUGAGUGAAU | AUUCACUCAAUGGAAGAGU | [1566-1584] | — | — | — | — |
| 140 | Hum, chimp | GGGAUUAUGUUGUUCCUGA | UCAGGAACAACAUAAUCCC | [307-325] | [305-323](18/19) | — | [427-445] | — |
| 141 | Hum | UGCCAUUUCAGUAACCACG | CGUGGUUACUGAAAUGGCA | [1432-1450] | — | — | — | — |
| 142 | Hum | UGUGGUGCCAUUUCAGUAA | UUACUGAAAUGGCACCACA | [1427-1445] | — | — | — | — |
| 143 | Hum | AGCUUGUGGUGCCAUUUCA | UGAAAUGGCACCACAAGCU | [1423-1441] | — | — | — | — |
| 144 | Hum | CUCUAAUGUUUUAAAGAGG | CCUCUUUAAAACAUUAGAG | [1397-1415] | — | — | — | — |
| 145 | Hum | GAACUGCUUCACUGUUUCU | AGAAACAGUGAAGCAGUUC | [1364-1382] | — | — | — | [1333-1345] |
| | | | | | | | | (13/13) |
| 146 | Hum | GGAACUGCUUCACUGUUUC | GAAACAGUGAAGCAGUUCC | [1363-1381] | — | — | — | [1333-1344] |
| | | | | | | | | (12/12) |
| 147 | Hum | ACGGCAAUAAUGGAACUGC | GCAGUUCCAUUAUUGCCGU | [1352-1370] | — | — | — | — |
| 148 | Hum | ACCCUAGGUAAGAGUAAAU | AUUUACUCUUACCUAGGGU | [1323-1341] | — | — | — | — |
| 149 | Hum | CUCUAAGUUUUCAGAGGAU | AUCCUCUGAAAACUUAGAG | [1164-1182] | — | — | — | — |
| 150 | Hum | GCUUGGUAAUAGACUAUAU | AUAUAGUCUAUUACCAAGC | [1103-1121] | — | — | — | — |
| 151 | Hum | AGGCUUGGUAAUAGACUAU | AUAGUCUAUUACCAAGCCU | [1101-1119] | — | — | — | — |
| 152 | Hum | GAGUUUUACAUUUGAUUCC | GGAAUCAAAUGUAAAACUC | [1065-1083] | — | — | — | — |
| 153 | Hum | GAAGCCCAUUUGAGUUUUA | UAAAACUCAAAUGGGCUUC | [1054-1072] | — | — | — | — |
| 154 | Hum, chimp | GAGCCUGCUAAGUGAUUUU | AAAAUCACUUAGCAGGCUC | [281-299] | [283-296](14/14) | [164-177](14/14) | [401-419] | [263-281](18/19) |
| 155 | Hum | UGUACAGAAUUGAAUGGGA | UCCCAUUCAAUUCUGUACA | [1014-1032] | — | — | — | — |
| 156 | Hum | UUGUACAGAAUUGAAUGGG | CCCAUUCAAUUCUGUACAA | [1013-1031] | — | — | — | — |
| 157 | Hum | GUGAUUCAAAAUAGUGUAG | CUACACUAUUUUGAAUCAC | [972-990] | — | — | — | — |
| 158 | Hum | UUGGAGAAGUGAUUCAAAA | UUUUGAAUCACUUCUCCAA | [964-982] | — | — | — | — |
| 159 | Hum | CAGGCUGAUUUUCUGGCCU | AGGCCAGAAAAUCAGCCUG | [945-963] | [939-949](11/11) | — | — | — |
| 160 | Hum | GCUAACAGGCUGAUUUUCU | AGAAAAUCAGCCUGUUAGC | [940-958] | [939-949](11/11) | — | — | — |
| 161 | Hum | GCUAAAGUCAUUUGUAGUU | AACUACAAAUGACUUUAGC | [845-863] | [845-858](14/14) | — | — | [834-845](12/12) |
| 162 | Hum | UAGUCAGCUAAAGUCAUUU | AAAUGACUUUAGCUGACUA | [839-857] | — | — | — | — |
| 163 | Hum | CUAGUCAGCUAAAGUCAUU | AAUGACUUUAGCUGACUAG | [838-856] | — | — | — | — |
| 164 | Hum | UGAUUGGGUAGUAAAACUA | UAGUUUUACUACCCAAUCA | [814-832] | — | — | — | — |
| 165 | Hum, chimp | GCAUUUCAGAAUUGCUGGA | UCCAGCAAUUCUGAAAUGC | [244-262] | — | — | [364-382] | — |
| 166 | Hum | GAAGGGUCCUAAAAAGGGA | UCCCUUUUUAGGACCCUUC | [774-792] | — | — | — | — |
| 167 | Hum | GGUUUCAGGAGAACUCUGA | UCAGAGUUCUCCUGAAACC | [690-708] | — | — | — | — |
| 168 | Hum | UCCUCUGGUUUCAGGAGAA | UUCUCCUGAAACCAGAGGA | [684-702] | — | — | — | — |
| 169 | Hum | AGGGACUUUUUCUUUAGUA | UACUAAAGAAAAAGUCCCU | [654-672] | — | — | [774-789](16/16) | — |
| 170 | Hum, chimp | CUACUUUUGAGCUUACACU | AGUGUAAGCUCAAAAGUAG | [598-616] | — | — | [718-736] | — |
| 171 | Hum | CUAGCGUCGUACCUACUUU | AAAGUAGGUACGACGCUAG | [586-604] | — | — | — | — |
| 172 | Hum, ms, rat, chimp | GUAAAAAGCUGGAUAGGAU | AUCCUAUCCAGCUUUUUAC | [556-574] | [554-572] | [435-453] | [676-694] | [538-552](15/15) |
| 173 | Hum, ms, rat, dog | UUAUGCACGUGAACUUGGA | UCCAAGUUCACGUGCAUAA | [523-541] | [521-539] | [402-420] | [643-661](18/19) | [505-523] |
| 174 | Hum, ms | GGUUGUGUUAUGCACGUGA | UCACGUGCAUAACACAACC | [516-534] | [514-532] | [398-413](16/16) | [636-654](18/19) | [501-516](16/16) |
| 175 | Hum | GCGAGGUUGUGUUAUGCAC | GUGCAUAACACAACCUCGC | [512-530] | [514-528](15/15) | [398-409](12/12) | [632-649](18/18) | [494-512](18/19) |
| 176 | Hum, chimp | AAAGCAAACUAAACUUGGU | ACCAAGUUUAGUUUGCUUU | [407-425] | — | — | [527-545] | — |
| 177 | Hum | CUGUUAUGCUUACAAAAUG | CAUUUUGUAAGCAUAACAG | [2481-2499] | — | — | — | — |
| 178 | Hum | UCCUUUUUCCACUAACAGU | ACUGUUAGUGGAAAAAGGA | [2444-2462] | — | — | — | — |
| 179 | Hum | CAAUCUUUAUAGAAUUGGG | CCCAAUUCUAUAAAGAUUG | [2296-2314] | — | — | — | — |
| 180 | Hum | CCAAUCUUUAUAGAAUUGG | CCAAUUCUAUAAAGAUUGG | [2295-2313] | — | — | — | — |
| 181 | Hum | AUACUACAAAGCCAAUCUU | AAGAUUGGCUUUGUAGUAU | [2284-2302] | [1571-1581](11/11) | — | — | — |
| 182 | Hum | CCAGUGUUCUAACAAACUA | UAGUUUGUUAGAACACUGG | [2243-2261] | — | — | — | — |
| 183 | Hum | ACUGUUCAAAUUAGCCAGU | ACUGGCUAAUUUGAACAGU | [2229-2247] | — | — | — | — |
| 184 | Hum | CCUAAAAUGUCACUGUUCA | UGAACAGUGACAUUUUAGG | [2218-2236] | — | — | — | — |
| 185 | Hum | UGACCUAAAAUGUCACUGU | ACAGUGACAUUUUAGGUCA | [2215-2233] | — | — | — | — |
| 186 | Hum | UAAGUGACCUAAAAUGUCA | UGACAUUUUAGGUCACUUA | [2211-2229] | — | — | — | — |
| 187 | Hum | CUAUAAGUGACCUAAAAUG | CAUUUUAGGUCACUUAUAG | [2208-2226] | — | — | — | — |
| 188 | Hum | GUGUGAUCCUGUUACUGAU | AUCAGUAACAGGAUCACAC | [2188-2206] | — | — | — | — |
| 189 | Hum | CCACUUCACAUGCUGGAGA | UCUCCAGCAUGUGAAGUGG | [2123-2141] | — | — | — | — |
| 190 | Hum | GGCUUUCAUAUCCUUGCUG | CAGCAAGGAUAUGAAAGCC | [2054-2072] | — | — | — | — |
| 191 | Hum | GCAAGGCUUUCAUAUCCUU | AAGGAUAUGAAAGCCUUGC | [2050-2068] | — | — | — | — |
| 192 | Hum | CACUCAACAAUGUUCAAUU | AAUUGAACAUUGUUGAGUG | [2029-2047] | — | — | — | — |
| 193 | Hum | UAGCCUCCACUCAACAAUG | CAUUGUUGAGUGGAGGCUA | [2022-2040] | — | — | — | — |
| 194 | Hum | GUAGAUCAUUAUCUCUUUC | GAAAGAGAUAAUGAUCUAC | [1979-1997] | — | — | — | — |
| 195 | Hum | CCACCUUGGAUACCUGUCA | UGACAGGUAUCCAAGGUGG | [1916-1934] | — | — | — | — |
| 196 | Hum | AUGCAUGCACCCAGAUUUU | AAAAUCUGGGUGCAUGCAU | [1895-1913] | — | — | — | — |
| 197 | Hum | UUGAAACGGGUCAAUUUAC | GUAAAUUGACCCGUUUCAA | [1804-1822] | — | — | — | — |
| 198 | Hum, chimp | UCAACGAGGUAAUAUUUGA | UCAAAUAUUACCUCGUUGA | [334-352] | — | — | [454-472] | — |
| 199 | Hum, chimp | ACCUCAACGAGGUAAUAUU | AAUAUUACCUCGUUGAGGU | [331-349] | [329-341](13/13) | [210-222](13/13) | [451-469] | — |
| 200 | Hum, chimp | CCAACCUCAACGAGGUAAU | AUUACCUCGUUGAGGUUGG | [328-346] | [326-341](16/16) | [207-222](16/16) | [448-466] | — |
| 201 | Hum | GUGCUUAAUCUCAGAUGAA | UUCAUCUGAGAUUAAGCAC | [1674-1692] | — | — | — | — |
| 202 | Hum | CUAGUCCCUCUCUGAUUCA | UGAAUCAGAGAGGGACUAG | [1623-1641] | [1278-1288](11/11) | — | — | — |
| 203 | Hum | AUGAAUACCUGUGAGGAUA | UAUCCUCACAGGUAUUCAU | [1586-1604] | — | — | — | — |
| 204 | Hum | AGAGGGGACUCCUAAGAAG | CUUCUUAGGAGUCCCCUCU | [79-97] | — | — | — | — |
| 205 | Hum | GAUUACUCUUCCAUUGAGU | ACUCAAUGGAAGAGUAAUC | [1562-1580] | — | — | — | — |
| 206 | Hum | UGAUUACUCUUCCAUUGAG | CUCAAUGGAAGAGUAAUCA | [1561-1579] | — | — | — | — |
| 207 | Hum | UAGUUGAUUACUCUUCCAU | AUGGAAGAGUAAUCAACUA | [1557-1575] | — | — | — | — |
| 208 | Hum | GUAGUUGAUUACUCUUCCA | UGGAAGAGUAAUCAACUAC | [1556-1574] | — | — | — | — |
| 209 | Hum | GUGUUGAAUACUGUCUUUA | UAAAGACAGUAUUCAACAC | [1497-1515] | — | — | — | — |
| 210 | Hum | AAGCUCAGUUUCCCCUGUU | AACAGGGGAAACUGAGCUU | [1473-1491] | — | — | — | — |
| 211 | Hum | ACCACGGUGUUGUUUUAGA | UCUAAAACAACACCGUGGU | [1445-1463] | — | — | — | — |
| 212 | Hum | GUGCCAUUUCAGUAACCAC | GUGGUUACUGAAAUGGCAC | [1431-1449] | — | — | — | — |
| 213 | Hum | GGUGCCAUUUCAGUAACCA | UGGUUACUGAAAUGGCACC | [1430-1448] | — | — | — | — |
| 214 | Hum | CUGCUUCACUGUUUCUUGG | CCAAGAAACAGUGAAGCAG | [1367-1385] | — | — | — | [1333-1346] |
| | | | | | | | | (14/14) |
| 215 | Hum | AACUGCUUCACUGUUUCUU | AAGAAACAGUGAAGCAGUU | [1365-1383] | — | — | — | [1333-1346] |
| | | | | | | | | (14/14) |
| 216 | Hum | CAAUAAUGGAACUGCUUCA | UGAAGCAGUUCCAUUAUUG | [1356-1374] | — | — | — | — |
| 217 | Hum | AGGUAAGAGUAAAUGAGAA | UUCUCAUUUACUCUUACCU | [1328-1346] | — | — | — | — |
| 218 | Hum | GGAUUAAGUAGGUGAGUUU | AAACUCACCUACUUAAUCC | [1292-1310] | — | — | — | — |
| 219 | Hum | GACUCAAAUUUGAAGGGUU | AACCCUUCAAAUUUGAGUC | [1257-1275] | — | — | — | — |
| 220 | Hum | CAGAUUUGCCUAUUUUGAU | AUCAAAAUAGGCAAAUCUG | [1126-1144] | — | — | — | — |
| 221 | Hum | CCAGAUUUGCCUAUUUUGA | UCAAAAUAGGCAAAUCUGG | [1125-1143] | — | — | — | — |
| 222 | Hum | AUAUAAACCAGAUUUGCCU | AGGCAAAUCUGGUUUAUAU | [1118-1136] | — | — | — | — |
| 223 | Hum | GGCUUGGUAAUAGACUAUA | UAUAGUCUAUUACCAAGCC | [1102-1120] | — | — | — | — |
| 224 | Hum | UUCCACAAUUUGGUUUCAG | CUGAAACCAAAUUGUGGAA | [1080-1098] | — | — | — | — |
| 225 | Hum | UUUGAUUCCACAAUUUGGU | ACCAAAUUGUGGAAUCAAA | [1075-1093] | — | — | — | — |
| 226 | Hum | GGAAUAGGUAAGCAAAAGU | ACUUUUGCUUACCUAUUCC | [1034-1052] | — | — | — | — |
| 227 | Hum | CAGAAUUGAAUGGGAUGGA | UCCAUCCCAUUCAAUUCUG | [1018-1036] | — | — | — | — |
| 228 | Hum | GAUCCCAUUUUUGUACAGA | UCUGUACAAAAAUGGGAUC | [1003-1021] | — | — | — | — |
| 229 | Hum | AGAUCCCAUUUUUGUACAG | CUGUACAAAAAUGGGAUCU | [1002-1020] | — | — | — | — |
| 230 | Hum | GUGUAGAUUUUCUGCAUAG | CUAUGCAGAAAAUCUACAC | [985-1003] | — | — | — | — |
| 231 | Hum | AGGCUGAUUUUCUGGCCUU | AAGGCCAGAAAAUCAGCCU | [946-964] | [939-949](11/11) | — | — | — |
| 232 | Hum | CACAUUCAUAGCAACUGCA | UGCAGUUGCUAUGAAUGUG | [921-939] | — | — | — | — |
| 233 | Hum | CCCCACCUGCCCUAAAUAA | UUAUUUAGGGCAGGUGGGG | [866-884] | — | — | — | — |
| 234 | Hum | AGCUAAAGUCAUUUGUAGU | ACUACAAAUGACUUUAGCU | [844-862] | [845-857](13/13) | — | — | [834-845](12/12) |
| 235 | Hum | UCAGCUAAAGUCAUUUGUA | UACAAAUGACUUUAGCUGA | [842-860] | [845-855](11/11) | — | — | — |
| 236 | Hum | CAGCUAGUCAGCUAAAGUC | GACUUUAGCUGACUAGCUG | [835-853] | — | — | — | — |
| 237 | Hum | UGGGUAGUAAAACUAUUCA | UGAAUAGUUUUACUACCCA | [818-836] | — | — | — | — |
| 238 | Hum | GAUUAUUUCAUGAUUGGGU | ACCCAAUCAUGAAAUAAUC | [804-822] | — | — | — | — |
| 239 | Hum | GGUCCUAAAAAGGGAAAAU | AUUUUCCCUUUUUAGGACC | [778-796] | — | — | — | — |
| 240 | Hum, chimp | CAGCAUUUCAGAAUUGCUG | CAGCAAUUCUGAAAUGCUG | [242-260] | [240-251](12/12) | [121-139](18/19) | [362-380] | — |
| 241 | Hum, chimp | GCCAGCAUUUCAGAAUUGC | GCAAUUCUGAAAUGCUGGC | [240-258] | [238-251](14/14) | [119-137](18/19) | [360-378] | — |
| 242 | Hum | AGAACUCUGAUCCUCAGCU | AGCUGAGGAUCAGAGUUCU | [699-717] | — | [579-596](18/18) | — | — |
| 243 | Hum | UAAGAAGCCACCUGCCUGU | ACAGGCAGGUGGCUUCUUA | [91-109] | — | — | — | — |
| 244 | Hum | CUCCUCUGGUUUCAGGAGA | UCUCCUGAAACCAGAGGAG | [683-701] | — | — | — | — |
| 245 | Hum | GGGACUUUUUCUUUAGUAG | CUACUAAAGAAAAAGUCCC | [655-673] | — | — | [775-789](15/15) | — |
| 246 | Hum, chimp | AGCUUACACUUGUGUUUAA | UUAAACACAAGUGUAAGCU | [607-625] | [613-623](11/11) | — | [727-745] | [589-607](18/19) |
| 247 | Hum | GUCGUACCUACUUUUGAGC | GCUCAAAAGUAGGUACGAC | [591-609] | — | — | [711-729](18/19) | — |
| 248 | Hum | AGCGUCGUACCUACUUUUG | CAAAAGUAGGUACGACGCU | [588-606] | — | — | — | — |
| 249 | Hum, rat, chimp | AAGCUGGAUAGGAUUGUGU | ACACAAUCCUAUCCAGCUU | [561-579] | [559-577](18/19) | [440-458] | [681-699] | — |
| 250 | Hum, chimp | UUGCGAGGUUGUGUUAUGC | GCAUAACACAACCUCGCAA | [510-528] | [514-526](13/13) | — | [630-648] | — |
| 251 | Hum, ms, chimp, dog | UUGCUCAAGAUGUCCUGCG | CGCAGGACAUCUUGAGCAA | [466-484] | [464-482] | [345-363](18/19) | [586-604] | [448-466] |
| 252 | Hum, ms, chimp | ACCCAGAGAAUUGCUCAAG | CUUGAGCAAUUCUCUGGGU | [456-474] | [454-472] | [335-353](18/19) | [576-594] | — |
| 253 | Hum, chimp | UCAAAGCAAACUAAACUUG | CAAGUUUAGUUUGCUUUGA | [405-423] | [403-421](18/19) | [284-300](16/17) | [525-543] | [387-397](11/11) |
| 254 | Hum, chimp | UCCAAAUCAAAGCAAACUA | UAGUUUGCUUUGAUUUGGA | [399-417] | [397-413](16/17) | [278-294](16/17) | [519-537] | [381-397](17/17) |
| 255 | Hum | AUGGAAGGCUGUUAAAUUA | UAAUUUAACAGCCUUCCAU | [2510-2528] | — | — | — | — |
| 256 | Hum, chimp, dog | CUGUCCAAAUCAAAGCAAA | UUUGCUUUGAUUUGGACAG | [396-414] | [394-412](18/19) | — | [516-534] | [378-396] |
| 257 | Hum, chimp, dog | GUCUGUCCAAAUCAAAGCA | UGCUUUGAUUUGGACAGAC | [394-412] | — | — | [514-532] | [376-394] |
| 258 | Hum | GUUAUGCUUACAAAAUGGU | ACCAUUUUGUAAGCAUAAC | [2483-2501] | — | — | — | — |
| 259 | Hum | UUGACUCUCUUGCCUGUUA | UAACAGGCAAGAGAGUCAA | [2468-2486] | — | — | — | — |
| 260 | Hum | CCUUUUUCCACUAACAGUU | AACUGUUAGUGGAAAAAGG | [2445-2463] | — | — | — | — |
| 261 | Hum, chimp, dog | GAACUGUCUGUCCAAAUCA | UGAUUUGGACAGACAGUUC | [389-407] | [387-405](18/19) | [268-282](15/15) | [509-527] | [371-389] |
| 262 | Hum | UGGGCAUCGAUGUAGAACU | AGUUCUACAUCGAUGCCCA | [2421-2439] | — | — | — | — |
| 263 | Hum | AAAGGUUCACUGUGUUUCU | AGAAACACAGUGAACCUUU | [2359-2377] | — | — | — | — |
| 264 | Hum | UCCAAAGGUUCACUGUGUU | AACACAGUGAACCUUUGGA | [2356-2374] | — | — | — | — |
| 265 | Hum | GCAUGUCUAUUGUUAAGCU | AGCUUAACAAUAGACAUGC | [2338-2356] | — | — | — | — |
| 266 | Hum | UCAAUGUUGUUUUGCAUGU | ACAUGCAAAACAACAUUGA | [2325-2343] | — | — | — | — |
| 267 | Hum | UUGGGCCAAGAUAAAUCAA | UUGAUUUAUCUUGGCCCAA | [2310-2328] | — | — | — | — |
| 268 | Hum | AUUGGGCCAAGAUAAAUCA | UGAUUUAUCUUGGCCCAAU | [2309-2327] | — | — | — | — |
| 269 | Hum | CAAAGCCAAUCUUUAUAGA | UCUAUAAAGAUUGGCUUUG | [2290-2308] | — | — | — | — |
| 270 | Hum | CUACAAAGCCAAUCUUUAU | AUAAAGAUUGGCUUUGUAG | [2287-2305] | — | — | — | — |
| 271 | Hum | ACUAAACUCUUCAAAUGCU | AGCAUUUGAAGAGUUUAGU | [2258-2276] | — | — | — | — |
| 272 | Hum | GUGUUCUAACAAACUAAAC | GUUUAGUUUGUUAGAACAC | [2246-2264] | — | — | — | — |
| 273 | Hum | UCACUGUUCAAAUUAGCCA | UGGCUAAUUUGAACAGUGA | [2227-2245] | — | — | — | — |
| 274 | Hum | CUGUUACUGAUACUAUAAG | CUUAUAGUAUCAGUAACAG | [2196-2214] | — | — | — | — |
| 275 | Hum | UCCUGUUACUGAUACUAUA | UAUAGUAUCAGUAACAGGA | [2194-2212] | — | — | — | — |
| 276 | Hum | AUCCUGUUACUGAUACUAU | AUAGUAUCAGUAACAGGAU | [2193-2211] | — | — | — | — |
| 277 | Hum | CAGGUGUGAUCCUGUUACU | AGUAACAGGAUCACACCUG | [2185-2203] | — | — | — | — |
| 278 | Hum | UAGGGACAGAUGUAUUCAU | AUGAAUACAUCUGUCCCUA | [2148-2166] | — | — | — | — |
| 279 | Hum | GCUAUUAGCUCCACUUCAC | GUGAAGUGGAGCUAAUAGC | [2113-2131] | — | — | — | — |
| 280 | Hum | GCCCUAGCUAUUAGCUCCA | UGGAGCUAAUAGCUAGGGC | [2107-2125] | — | — | — | — |
| 281 | Hum | UCGUGGAUAAGGAGCUUAU | AUAAGCUCCUUAUCCACGA | [2077-2095] | — | — | — | — |
| 282 | Hum | AAGGCUUUCAUAUCCUUGC | GCAAGGAUAUGAAAGCCUU | [2052-2070] | — | — | — | — |
| 283 | Hum | CCACUCAACAAUGUUCAAU | AUUGAACAUUGUUGAGUGG | [2028-2046] | — | — | — | — |
| 284 | Hum | CCUCCACUCAACAAUGUUC | GAACAUUGUUGAGUGGAGG | [2025-2043] | — | — | — | — |
| 285 | Hum | GGAUACCUGUCACUAGGGA | UCCCUAGUGACAGGUAUCC | [1923-1941] | — | — | — | — |
| 286 | Hum | ACCUUGGAUACCUGUCACU | AGUGACAGGUAUCCAAGGU | [1918-1936] | — | — | — | — |
| 287 | Hum | UCACCGUCCAGAUAACCAU | AUGGUUAUCUGGACGGUGA | [1878-1896] | — | — | — | — |
| 288 | Hum | AACUCACCGUCCAGAUAAC | GUUAUCUGGACGGUGAGUU | [1875-1893] | — | — | — | — |
| 289 | Hum | GAGAUAUGGUUUAUAGUAC | GUACUAUAAACCAUAUCUC | [1842-1860] | — | — | — | — |
| 290 | Hum | GCAUUGGCUAUGGAGAUAU | AUAUCUCCAUAGCCAAUGC | [1830-1848] | — | — | — | — |
| 291 | Hum, chimp | AACGAGGUAAUAUUUGAGG | CCUCAAAUAUUACCUCGUU | [336-354] | — | — | [456-474] | — |
| 292 | Hum, chimp | CAACGAGGUAAUAUUUGAG | CUCAAAUAUUACCUCGUUG | [335-353] | — | — | [455-473] | — |
| 293 | Hum | CUGUAUACUACCACUUUGA | UCAAAGUGGUAGUAUACAG | [1781-1799] | — | — | — | — |
| 294 | Hum | UAGCUGUAUACUACCACUU | AAGUGGUAGUAUACAGCUA | [1778-1796] | — | — | — | — |
| 295 | Hum | GUAGCUGUAUACUACCACU | AGUGGUAGUAUACAGCUAC | [1777-1795] | — | — | — | — |
| 296 | Hum | UGGCAGUGUUAUCUCAUCU | AGAUGAGAUAACACUGCCA | [1704-1722] | — | — | — | — |
| 297 | Hum | UCUCAGAUGAACCAUUUCA | UGAAAUGGUUCAUCUGAGA | [1682-1700] | — | — | — | — |
| 298 | Hum | UAAUCUCAGAUGAACCAUU | AAUGGUUCAUCUGAGAUUA | [1679-1697] | — | — | — | — |
| 299 | Hum | CCCUCUCUGAUUCACUUAG | CUAAGUGAAUCAGAGAGGG | [1628-1646] | — | — | — | — |
| 300 | Hum | AGUCCCUCUCUGAUUCACU | AGUGAAUCAGAGAGGGACU | [1625-1643] | [1278-1288](11/11) | — | — | — |
| 301 | Hum | UAGUCCCUCUCUGAUUCAC | GUGAAUCAGAGAGGGACUA | [1624-1642] | [1278-1288](11/11) | — | — | — |
| 302 | Hum | UUGAUUACUCUUCCAUUGA | UCAAUGGAAGAGUAAUCAA | [1560-1578] | — | — | — | — |
| 303 | Hum | GUGUAGUUGAUUACUCUUC | GAAGAGUAAUCAACUACAC | [1554-1572] | — | — | — | — |
| 304 | Hum | CCCCUGUUCUUAAGUGUUG | CAACACUUAAGAACAGGGG | [1484-1502] | — | — | — | — |
| 305 | Hum | UUCCCCUGUUCUUAAGUGU | ACACUUAAGAACAGGGGAA | [1482-1500] | — | — | — | — |
| 306 | Hum | CAGUUUCCCCUGUUCUUAA | UUAAGAACAGGGGAAACUG | [1478-1496] | — | — | — | — |
| 307 | Hum | GCCUUUAUAAGCUCAGUUU | AAACUGAGCUUAUAAAGGC | [1465-1483] | — | — | — | — |
| 308 | Hum | GUGUUGUUUUAGAUGCCUU | AAGGCAUCUAAAACAACAC | [1451-1469] | — | — | — | — |
| 309 | Hum | ACGGUGUUGUUUUAGAUGC | GCAUCUAAAACAACACCGU | [1448-1466] | — | — | — | — |
| 310 | Hum | CCACGGUGUUGUUUUAGAU | AUCUAAAACAACACCGUGG | [1446-1464] | — | — | — | — |
| 311 | Hum | UCAGUAACCACGGUGUUGU | ACAACACCGUGGUUACUGA | [1439-1457] | — | — | — | — |
| 312 | Hum | CCAUUUCAGUAACCACGGU | ACCGUGGUUACUGAAAUGG | [1434-1452] | — | — | — | — |
| 313 | Hum | GUAGGAUUAAGUAGGUGAG | CUCACCUACUUAAUCCUAC | [1289-1307] | — | — | — | — |
| 314 | Hum | GGUAGGAUUAAGUAGGUGA | UCACCUACUUAAUCCUACC | [1288-1306] | — | — | — | — |
| 315 | Hum | AAGGGUUUUUAGACAGGAA | UUCCUGUCUAAAAACCCUU | [1269-1287] | — | — | — | — |
| 316 | Hum | UUGAAGGGUUUUUAGACAG | CUGUCUAAAAACCCUUCAA | [1266-1284] | — | — | — | — |
| 317 | Hum | CAGUUCCUGACUCAAAUUU | AAAUUUGAGUCAGGAACUG | [1249-1267] | — | — | — | — |
| 318 | Hum | ACCAGUUCCUGACUCAAAU | AUUUGAGUCAGGAACUGGU | [1247-1265] | — | — | — | — |
| 319 | Hum | CCUAUCAAAACUUCCAAAA | UUUUGGAAGUUUUGAUAGG | [1219-1237] | — | — | — | [1182-1194] |
| | | | | | | | | (13/13) |
| 320 | Hum, chimp | UGCUAAGUGAUUUUGACUA | UAGUCAAAAUCACUUAGCA | [286-304] | [284-302](18/19) | [165-183](18/19) | [406-424] | [268-286](18/19) |
| 321 | Hum | UCCACAAUUUGGUUUCAGG | CCUGAAACCAAAUUGUGGA | [1081-1099] | — | — | — | — |
| 322 | Hum | UGAUUCCACAAUUUGGUUU | AAACCAAAUUGUGGAAUCA | [1077-1095] | — | — | — | — |
| 323 | Hum | AUAGAUCCCAUUUUUGUAC | GUACAAAAAUGGGAUCUAU | [1000-1018] | — | — | — | — |
| 324 | Hum, chimp | CAGAGAGCCUGCUAAGUGA | UCACUUAGCAGGCUCUCUG | [277-295] | [283-293](11/11) | [164-174](11/11) | [397-415] | [263-273](11/11) |
| 325 | Hum | GUAGAUUUUCUGCAUAGAU | AUCUAUGCAGAAAAUCUAC | [987-1005] | — | — | — | — |
| 326 | Hum | UAGUGUAGAUUUUCUGCAU | AUGCAGAAAAUCUACACUA | [983-1001] | — | — | — | — |
| 327 | Hum | AUAGUGUAGAUUUUCUGCA | UGCAGAAAAUCUACACUAU | [982-1000] | — | — | — | — |
| 328 | Hum | UGUUUCACAUUCAUAGCAA | UUGCUAUGAAUGUGAAACA | [916-934] | — | — | — | — |
| 329 | Hum | CACCUGCCCUAAAUAAGAA | UUCUUAUUUAGGGCAGGUG | [869-887] | — | — | — | — |
| 330 | Hum | AAAGUCAUUUGUAGUUUGC | GCAAACUACAAAUGACUUU | [848-866] | [845-861](17/17) | — | — | [834-845](12/12) |
| 331 | Hum | GCUAGUCAGCUAAAGUCAU | AUGACUUUAGCUGACUAGC | [837-855] | — | — | — | — |
| 332 | Hum | UCAGCUAGUCAGCUAAAGU | ACUUUAGCUGACUAGCUGA | [834-852] | — | — | — | — |
| 333 | Hum | GGGUAGUAAAACUAUUCAG | CUGAAUAGUUUUACUACCC | [819-837] | — | — | — | — |
| 334 | Hum, chimp | CCAGCAUUUCAGAAUUGCU | AGCAAUUCUGAAAUGCUGG | [241-259] | [239-251](13/13) | [120-138](18/19) | [361-379] | — |
| 335 | Hum, ms | CAGCUCAGGAUUUCGACUU | AAGUCGAAAUCCUGAGCUG | [713-731] | [711-729] | [592-610](18/19) | — | — |
| 336 | Hum, rat | GAACUCUGAUCCUCAGCUC | GAGCUGAGGAUCAGAGUUC | [700-718] | — | [579-597] | — | — |
| 337 | Hum | CGCUUCUCCUCUGGUUUCA | UGAAACCAGAGGAGAAGCG | [678-696] | [676-686](11/11) | — | — | — |
| 338 | Hum | GACUUUUUCUUUAGUAGAG | CUCUACUAAAGAAAAAGUC | [657-675] | — | — | [777-789](13/13) | — |
| 339 | Hum | UCAGGGACUUUUUCUUUAG | CUAAAGAAAAAGUCCCUGA | [652-670] | — | — | [772-789](18/18) | — |
| 340 | Hum, chimp | UUCAGGGACUUUUUCUUUA | UAAAGAAAAAGUCCCUGAA | [651-669] | — | — | [771-789] | — |
| 341 | Hum, chimp | CUUUUGAGCUUACACUUGU | ACAAGUGUAAGCUCAAAAG | [601-619] | — | — | [721-739] | — |
| 342 | Hum | UACCUACUUUUGAGCUUAC | GUAAGCUCAAAAGUAGGUA | [595-613] | — | — | [717-733](17/17) | — |
| 343 | Hum | GUACCUACUUUUGAGCUUA | UAAGCUCAAAAGUAGGUAC | [594-612] | — | — | [717-732](16/16) | — |
| 344 | Hum, rat, chimp, dog | GUGAACUUGGAAAUUGAAA | UUUCAAUUUCCAAGUUCAC | [531-549] | [529-547](18/19) | [410-428] | [651-669] | [513-531] |
| 345 | Hum, rat, dog | GCACGUGAACUUGGAAAUU | AAUUUCCAAGUUCACGUGC | [527-545] | [525-539](15/15) | [406-424] | [651-665](15/15) | [509-527] |
| 346 | Hum, ms, chimp, dog | UCCCUGAGAAACUGACCCA | UGGGUCAGUUUCUCAGGGA | [442-460] | [440-458] | [323-339](17/17) | [562-580] | [424-442] |
| 347 | Hum, chimp | AGGUCCUUGUCCCUGAGAA | UUCUCAGGGACAAGGACCU | [433-451] | [439-449](11/11) | — | [553-571] | [417-433](17/17) |
| 348 | Hum, chimp | GCAAACUAAACUUGGUUGC | GCAACCAAGUUUAGUUUGC | [410-428] | [408-426](18/19) | — | [530-548] | — |
| 349 | Hum, chimp | GUCCAAAUCAAAGCAAACU | AGUUUGCUUUGAUUUGGAC | [398-416] | [396-413](17/18) | [277-294](17/18) | [518-536] | [380-397](18/18) |
| 350 | Hum, chimp, dog | UCUGUCCAAAUCAAAGCAA | UUGCUUUGAUUUGGACAGA | [395-413] | — | — | [515-533] | [377-395] |
| 351 | Hum | CCUGUUAUGCUUACAAAAU | AUUUUGUAAGCAUAACAGG | [2480-2498] | — | — | — | — |
| 352 | Hum | GCCUGUUAUGCUUACAAAA | UUUUGUAAGCAUAACAGGC | [2479-2497] | — | — | — | — |
| 353 | Hum | CAGUUAUCUUUGACUCUCU | AGAGAGUCAAAGAUAACUG | [2459-2477] | — | — | — | — |
| 354 | Hum | CACUAACAGUUAUCUUUGA | UCAAAGAUAACUGUUAGUG | [2453-2471] | — | — | — | — |
| 355 | Hum | UCCACUAACAGUUAUCUUU | AAAGAUAACUGUUAGUGGA | [2451-2469] | — | — | — | — |
| 356 | Hum, chimp, dog | AGAACUGUCUGUCCAAAUC | GAUUUGGACAGACAGUUCU | [388-406] | [386-400](15/15) | [267-282](16/16) | [508-526] | [370-388] |
| 357 | Hum | UGACUGGGCAAGGCUUCUU | AAGAAGCCUUGCCCAGUCA | [2403-2421] | — | — | — | — |
| 358 | Hum | UCACUGUGUUUCUGCCGCU | AGCGGCAGAAACACAGUGA | [2365-2383] | [2460-2470](11/11) | — | — | — |
| 359 | Hum | AAGGUUCACUGUGUUUCUG | CAGAAACACAGUGAACCUU | [2360-2378] | [2460-2470](11/11) | — | — | — |
| 360 | Hum | CCAAGAUAAAUCAAUGUUG | CAACAUUGAUUUAUCUUGG | [2315-2333] | — | — | — | — |
| 361 | Hum | GAUACUACAAAGCCAAUCU | AGAUUGGCUUUGUAGUAUC | [2283-2301] | [1571-1581](11/11) | — | — | — |
| 362 | Hum | AAAGAUACUACAAAGCCAA | UUGGCUUUGUAGUAUCUUU | [2280-2298] | [1571-1581](11/11) | — | — | — |
| 363 | Hum | GAAAGAUACUACAAAGCCA | UGGCUUUGUAGUAUCUUUC | [2279-2297] | [1571-1581](11/11) | — | — | — |
| 364 | Hum | UGGAAAGAUACUACAAAGC | GCUUUGUAGUAUCUUUCCA | [2277-2295] | [1571-1581](11/11) | — | — | — |
| 365 | Hum | UUGGAAAGAUACUACAAAG | CUUUGUAGUAUCUUUCCAA | [2276-2294] | [1571-1581](11/11) | — | — | — |
| 366 | Hum | UGCUUGGAAAGAUACUACA | UGUAGUAUCUUUCCAAGCA | [2273-2291] | — | — | — | — |
| 367 | Hum | AUGCUUGGAAAGAUACUAC | GUAGUAUCUUUCCAAGCAU | [2272-2290] | — | — | — | — |
| 368 | Hum | CUAAACUCUUCAAAUGCUU | AAGCAUUUGAAGAGUUUAG | [2259-2277] | — | — | — | — |
| 369 | Hum | AAGUGACCUAAAAUGUCAC | GUGACAUUUUAGGUCACUU | [2212-2230] | — | — | — | — |
| 370 | Hum | UGAUCCUGUUACUGAUACU | AGUAUCAGUAACAGGAUCA | [2191-2209] | — | — | — | — |
| 371 | Hum | ACAGGUGUGAUCCUGUUAC | GUAACAGGAUCACACCUGU | [2184-2202] | — | — | — | — |
| 372 | Hum | AUCCUGGUGUUACUGAAAA | UUUUCAGUAACACCAGGAU | [2165-2183] | — | — | — | — |
| 373 | Hum | GGACAGAUGUAUUCAUCCU | AGGAUGAAUACAUCUGUCC | [2151-2169] | — | — | — | — |
| 374 | Hum | AGCUCCACUUCACAUGCUG | CAGCAUGUGAAGUGGAGCU | [2119-2137] | — | — | — | — |
| 375 | Hum | AGCUAUUAGCUCCACUUCA | UGAAGUGGAGCUAAUAGCU | [2112-2130] | — | — | — | — |
| 376 | Hum, chimp | CUUGCCAGAAUUUGGUUAA | UUAACCAAAUUCUGGCAAG | [361-379] | [361-377](17/17) | [242-258](17/17) | [481-499] | — |
| 377 | Hum | AAGGAGCUUAUUCAGGUUU | AAACCUGAAUAAGCUCCUU | [2085-2103] | — | — | — | — |
| 378 | Hum | GCUUUCAUAUCCUUGCUGU | ACAGCAAGGAUAUGAAAGC | [2055-2073] | — | — | — | — |
| 379 | Hum | UGAGAGAAUUUAGCCUCCA | UGGAGGCUAAAUUCUCUCA | [2012-2030] | — | — | — | — |
| 380 | Hum | AUGAGAGAAUUUAGCCUCC | GGAGGCUAAAUUCUCUCAU | [2011-2029] | — | — | — | — |
| 381 | Hum, chimp | GGAAUCAACUUGCCAGAAU | AUUCUGGCAAGUUGAUUCC | [353-371] | — | — | [473-491] | [340-351](12/12) |
| 382 | Hum | UAGGGAAUAAUAAAGGCCU | AGGCCUUUAUUAUUCCCUA | [1936-1954] | — | — | — | — |
| 383 | Hum | UCACUAGGGAAUAAUAAAG | CUUUAUUAUUCCCUAGUGA | [1932-1950] | — | — | — | — |
| 384 | Hum | ACCUGUCACUAGGGAAUAA | UUAUUCCCUAGUGACAGGU | [1927-1945] | — | — | — | — |
| 385 | Hum | AUACCUGUCACUAGGGAAU | AUUCCCUAGUGACAGGUAU | [1925-1943] | — | — | — | — |
| 386 | Hum | UUGGAUACCUGUCACUAGG | CCUAGUGACAGGUAUCCAA | [1921-1939] | — | — | — | — |
| 387 | Hum | CACCUUGGAUACCUGUCAC | GUGACAGGUAUCCAAGGUG | [1917-1935] | — | — | — | — |
| 388 | Hum | ACCGUCCAGAUAACCAUGC | GCAUGGUUAUCUGGACGGU | [1880-1898] | — | — | — | — |
| 389 | Hum | GAAGUCUGCAUUGGCUAUG | CAUAGCCAAUGCAGACUUC | [1823-1841] | — | — | — | — |
| 390 | Hum | GAAUUAUUGAAACGGGUCA | UGACCCGUUUCAAUAAUUC | [1798-1816] | — | — | — | — |
| 391 | Hum | UAGUAGCUGUAUACUACCA | UGGUAGUAUACAGCUACUA | [1775-1793] | — | — | — | — |
| 392 | Hum | GGGUAGUAGCUGUAUACUA | UAGUAUACAGCUACUACCC | [1772-1790] | — | — | — | — |
| 393 | Hum | GUCAAGGGUAGUAGCUGUA | UACAGCUACUACCCUUGAC | [1767-1785] | — | — | — | — |
| 394 | Hum | UGAAGUAUCUCUCCUUAAC | GUUAAGGAGAGAUACUUCA | [1741-1759] | — | — | — | — |
| 395 | Hum | UUGAAGUAUCUCUCCUUAA | UUAAGGAGAGAUACUUCAA | [1740-1758] | — | — | — | — |
| 396 | Hum | GGGAAUUGAAGUAUCUCUC | GAGAGAUACUUCAAUUCCC | [1735-1753] | — | — | — | — |
| 397 | Hum | UGGGAAUUGAAGUAUCUCU | AGAGAUACUUCAAUUCCCA | [1734-1752] | — | — | — | — |
| 398 | Hum | GGCUUUUCUGGGAAUUGAA | UUCAAUUCCCAGAAAAGCC | [1726-1744] | — | — | — | — |
| 399 | Hum, chimp | CCCAACCUCAACGAGGUAA | UUACCUCGUUGAGGUUGGG | [327-345] | [325-341](17/17) | [206-222](17/17) | [447-465] | [309-325](16/17) |
| 400 | Hum | GCAGUGUUAUCUCAUCUCU | AGAGAUGAGAUAACACUGC | [1706-1724] | — | — | — | — |
| 401 | Hum | CUCAGAUGAACCAUUUCAC | GUGAAAUGGUUCAUCUGAG | [1683-1701] | — | — | — | — |
| 402 | Hum, chimp | CUGAACCCAACCUCAACGA | UCGUUGAGGUUGGGUUCAG | [322-340] | [320-338](18/19) | [206-219](14/14) | [442-460] | [306-319](14/14) |
| 403 | Hum | CUGAUUCACUUAGUAAUCU | AGAUUACUAAGUGAAUCAG | [1634-1652] | — | — | — | — |
| 404 | Hum | CUCUGAUUCACUUAGUAAU | AUUACUAAGUGAAUCAGAG | [1632-1650] | — | — | — | — |
| 405 | Hum | CCUCUCUGAUUCACUUAGU | ACUAAGUGAAUCAGAGAGG | [1629-1647] | — | — | — | — |
| 406 | Hum, chimp | AGGAAACAGAGCCGUUGAC | GUCAACGGCUCUGUUUCCU | [184-202] | [183-200](18/18) | [64-81](18/18) | [304-322] | [167-184](18/18) |
| 407 | Hum | UACUCUUCCAUUGAGUGAA | UUCACUCAAUGGAAGAGUA | [1565-1583] | — | — | — | — |
| 408 | Hum | GUGUGUAGUUGAUUACUCU | AGAGUAAUCAACUACACAC | [1552-1570] | — | — | — | — |
| 409 | Hum | GAACUGAUAUUUUUGUGUG | CACACAAAAAUAUCAGUUC | [1538-1556] | — | — | — | — |
| 410 | Hum | AAGUGUUGAAUACUGUCUU | AAGACAGUAUUCAACACUU | [1495-1513] | — | — | — | — |
| 411 | Hum | UCCCCUGUUCUUAAGUGUU | AACACUUAAGAACAGGGGA | [1483-1501] | — | — | — | — |
| 412 | Hum | GCUCAGUUUCCCCUGUUCU | AGAACAGGGGAAACUGAGC | [1475-1493] | — | — | — | — |
| 413 | Hum | AGCUCAGUUUCCCCUGUUC | GAACAGGGGAAACUGAGCU | [1474-1492] | — | — | — | — |
| 414 | Hum, chimp | GGAUUAUGUUGUUCCUGAA | UUCAGGAACAACAUAAUCC | [308-326] | [306-323](17/18) | — | [428-446] | — |
| 415 | Hum | UAAGCUCAGUUUCCCCUGU | ACAGGGGAAACUGAGCUUA | [1472-1490] | — | — | — | — |
| 416 | Hum | UGCCUUUAUAAGCUCAGUU | AACUGAGCUUAUAAAGGCA | [1464-1482] | — | — | — | — |
| 417 | Hum | AGAUGCCUUUAUAAGCUCA | UGAGCUUAUAAAGGCAUCU | [1461-1479] | — | — | — | — |
| 418 | Hum | UUAGAUGCCUUUAUAAGCU | AGCUUAUAAAGGCAUCUAA | [1459-1477] | — | — | — | — |
| 419 | Hum | CGGUGUUGUUUUAGAUGCC | GGCAUCUAAAACAACACCG | [1449-1467] | — | — | — | — |
| 420 | Hum | UAACCACGGUGUUGUUUUA | UAAAACAACACCGUGGUUA | [1443-1461] | — | — | — | — |
| 421 | Hum, chimp | CUACUGGGAUUAUGUUGUU | AACAACAUAAUCCCAGUAG | [302-320] | [300-317](18/18) | [181-195](15/15) | [422-440] | [284-302](18/19) |
| 422 | Hum, ms, chimp | ACUACUGGGAUUAUGUUGU | ACAACAUAAUCCCAGUAGU | [301-319] | [299-317] | [180-195](16/16) | [421-439] | [283-301](18/19) |
| 423 | Hum | AUGGAACUGCUUCACUGUU | AACAGUGAAGCAGUUCCAU | [1361-1379] | — | — | — | — |
| 424 | Hum | UUACGGCAAUAAUGGAACU | AGUUCCAUUAUUGCCGUAA | [1350-1368] | — | — | — | — |
| 425 | Hum | AGGUGAGUUUAAUUAAAGC | GCUUUAAUUAAACUCACCU | [1301-1319] | — | — | — | — |
| 426 | Hum | AGGAUUAAGUAGGUGAGUU | AACUCACCUACUUAAUCCU | [1291-1309] | — | — | — | — |
| 427 | Hum | ACAGGAAGGUAGGAUUAAG | CUUAAUCCUACCUUCCUGU | [1281-1299] | — | — | — | — |
| 428 | Hum | AGGGUUUUUAGACAGGAAG | CUUCCUGUCUAAAAACCCU | [1270-1288] | — | — | — | — |
| 429 | Hum | GAAGGGUUUUUAGACAGGA | UCCUGUCUAAAAACCCUUC | [1268-1286] | — | — | — | — |
| 430 | Hum | UGAAGGGUUUUUAGACAGG | CCUGUCUAAAAACCCUUCA | [1267-1285] | — | — | — | — |
| 431 | Hum | UUUGAAGGGUUUUUAGACA | UGUCUAAAAACCCUUCAAA | [1265-1283] | — | — | — | — |
| 432 | Hum, chimp | GUGAUUUUGACUACUGGGA | UCCCAGUAGUCAAAAUCAC | [292-310] | [290-308](18/19) | [171-189](18/19) | [412-430] | [275-292](18/18) |
| 433 | Hum | UCCUGACUCAAAUUUGAAG | CUUCAAAUUUGAGUCAGGA | [1253-1271] | — | — | — | — |
| 434 | Hum | UCUCUAAGUUUUCAGAGGA | UCCUCUGAAAACUUAGAGA | [1163-1181] | — | — | — | — |
| 435 | Hum | AGGUAGGCUUGGUAAUAGA | UCUAUUACCAAGCCUACCU | [1097-1115] | — | — | — | — |
| 436 | Hum | ACAAUUUGGUUUCAGGUAG | CUACCUGAAACCAAAUUGU | [1084-1102] | — | — | — | — |
| 437 | Hum | GUUUUACAUUUGAUUCCAC | GUGGAAUCAAAUGUAAAAC | [1067-1085] | — | — | — | — |
| 438 | Hum | AAGCCCAUUUGAGUUUUAC | GUAAAACUCAAAUGGGCUU | [1055-1073] | — | — | — | — |
| 439 | Hum | UAGAAGCCCAUUUGAGUUU | AAACUCAAAUGGGCUUCUA | [1052-1070] | — | — | — | — |
| 440 | Hum | AAGCAAAAGUAGAAGCCCA | UGGGCUUCUACUUUUGCUU | [1043-1061] | — | — | — | — |
| 441 | Hum | UAGGUAAGCAAAAGUAGAA | UUCUACUUUUGCUUACCUA | [1038-1056] | — | — | — | — |
| 442 | Hum | GAAUAGGUAAGCAAAAGUA | UACUUUUGCUUACCUAUUC | [1035-1053] | — | — | — | — |
| 443 | Hum | GGAUGGAAUAGGUAAGCAA | UUGCUUACCUAUUCCAUCC | [1030-1048] | — | — | — | — |
| 444 | Hum | GGGAUGGAAUAGGUAAGCA | UGCUUACCUAUUCCAUCCC | [1029-1047] | — | — | — | — |
| 445 | Hum | AGAAUUGAAUGGGAUGGAA | UUCCAUCCCAUUCAAUUCU | [1019-1037] | — | — | — | — |
| 446 | Hum | CUGCAUAGAUCCCAUUUUU | AAAAAUGGGAUCUAUGCAG | [996-1014] | — | — | — | — |
| 447 | Hum | UAGAUUUUCUGCAUAGAUC | GAUCUAUGCAGAAAAUCUA | [988-1006] | — | — | — | — |
| 448 | Hum | GGCCUUUGGAGAAGUGAUU | AAUCACUUCUCCAAAGGCC | [959-977] | — | — | — | — |
| 449 | Hum, chimp | ACUGUGGCUAUCACCCAGA | UCUGGGUGAUAGCCACAGU | [262-280] | [263-275](13/13) | — | [382-400] | — |
| 450 | Hum | GGCUGAUUUUCUGGCCUUU | AAAGGCCAGAAAAUCAGCC | [947-965] | — | — | — | — |
| 451 | Hum | ACAGGCUGAUUUUCUGGCC | GGCCAGAAAAUCAGCCUGU | [944-962] | [939-949](11/11) | — | — | — |
| 452 | Hum | AACAGGCUGAUUUUCUGGC | GCCAGAAAAUCAGCCUGUU | [943-961] | [939-949](11/11) | — | — | — |
| 453 | Hum | CUGCAGCUAACAGGCUGAU | AUCAGCCUGUUAGCUGCAG | [935-953] | — | — | — | — |
| 454 | Hum | AGCAACUGCAGCUAACAGG | CCUGUUAGCUGCAGUUGCU | [930-948] | — | — | — | — |
| 455 | Hum | UAGCAACUGCAGCUAACAG | CUGUUAGCUGCAGUUGCUA | [929-947] | — | — | — | — |
| 456 | Hum | UCAUAGCAACUGCAGCUAA | UUAGCUGCAGUUGCUAUGA | [926-944] | — | — | — | — |
| 457 | Hum | UCACAUUCAUAGCAACUGC | GCAGUUGCUAUGAAUGUGA | [920-938] | — | — | — | — |
| 458 | Hum, chimp | CAGAAUUGCUGGACUGUGG | CCACAGUCCAGCAAUUCUG | [250-268] | — | — | [370-388] | — |
| 459 | Hum | GCCCUAAAUAAGAAACCCC | GGGGUUUCUUAUUUAGGGC | [874-892] | — | — | — | — |
| 460 | Hum | CCACCUGCCCUAAAUAAGA | UCUUAUUUAGGGCAGGUGG | [868-886] | — | — | — | — |
| 461 | Hum | GUCAUUUGUAGUUUGCCCC | GGGGCAAACUACAAAUGAC | [851-869] | [846-862](17/17) | — | — | [834-845](12/12) |
| 462 | Hum | GUAAAACUAUUCAGCUAGU | ACUAGCUGAAUAGUUUUAC | [824-842] | — | — | — | — |
| 463 | Hum | UUGGGUAGUAAAACUAUUC | GAAUAGUUUUACUACCCAA | [817-835] | — | — | — | — |
| 464 | Hum | CCUCAGCUCAGGAUUUCGA | UCGAAAUCCUGAGCUGAGG | [710-728] | [709-726](18/18) | — | — | — |
| 465 | Hum | GGAGAACUCUGAUCCUCAG | CUGAGGAUCAGAGUUCUCC | [697-715] | — | [579-594](16/16) | — | — |
| 466 | Hum | UCGCUUCUCCUCUGGUUUC | GAAACCAGAGGAGAAGCGA | [677-695] | [675-686](12/12) | — | — | — |
| 467 | Hum | GUCGCUUCUCCUCUGGUUU | AAACCAGAGGAGAAGCGAC | [676-694] | [674-686](13/13) | — | — | — |
| 468 | Hum | GGACUUUUUCUUUAGUAGA | UCUACUAAAGAAAAAGUCC | [656-674] | — | — | [776-789](14/14) | — |
| 469 | Hum, chimp | UGGACUAGCUUCAGGGACU | AGUCCCUGAAGCUAGUCCA | [642-660] | — | — | [762-780] | [624-640](17/17) |
| 470 | Hum, chimp, dog | UGCUCAUGGACUAGCUUCA | UGAAGCUAGUCCAUGAGCA | [636-654] | — | — | [756-774] | [618-636] |
| 471 | Hum | ACCUACUUUUGAGCUUACA | UGUAAGCUCAAAAGUAGGU | [596-614] | — | — | [717-734](18/18) | — |
| 472 | Hum | UCGUACCUACUUUUGAGCU | AGCUCAAAAGUAGGUACGA | [592-610] | — | — | [712-730](18/19) | — |
| 473 | Hum | CGUCGUACCUACUUUUGAG | CUCAAAAGUAGGUACGACG | [590-608] | — | — | [711-728](17/18) | — |
| 474 | Hum, rat, dog | CACGUGAACUUGGAAAUUG | CAAUUUCCAAGUUCACGUG | [528-546] | [526-544](18/19) | [407-425] | [651-666](16/16) | [510-528] |
| 475 | Hum, chimp | UGCGAGGUUGUGUUAUGCA | UGCAUAACACAACCUCGCA | [511-529] | [514-527](14/14) | [398-408](11/11) | [631-649] | [493-511](18/19) |
| 476 | Hum, chimp, dog | UUGUCCCUGAGAAACUGAC | GUCAGUUUCUCAGGGACAA | [439-457] | [439-455](17/17) | [323-336](14/14) | [559-577] | [421-439] |
| 477 | Hum, chimp, dog | UCCUUGUCCCUGAGAAACU | AGUUUCUCAGGGACAAGGA | [436-454] | [439-452](14/14) | [323-333](11/11) | [556-574] | [418-436] |
| 478 | Hum, chimp | UGACCAUGGUUGCAACUGG | CCAGUUGCAACCAUGGUCA | [199-217] | [197-212](16/16) | [78-93](16/16) | [319-337] | — |
| 479 | Hum, chimp | AACUAAACUUGGUUGCUCA | UGAGCAACCAAGUUUAGUU | [413-431] | [415-428](14/14) | — | [533-551] | [402-413](12/12) |
| 480 | Hum, chimp | AGCAAACUAAACUUGGUUG | CAACCAAGUUUAGUUUGCU | [409-427] | [407-425](18/19) | — | [529-547] | — |
| 481 | Hum | UGUUAUGCUUACAAAAUGG | CCAUUUUGUAAGCAUAACA | [2482-2500] | — | — | — | — |
| 482 | Hum, chimp, dog | ACUGUCUGUCCAAAUCAAA | UUUGAUUUGGACAGACAGU | [391-409] | [389-407](18/19) | [270-288](18/19) | [511-529] | [373-391] |
| 483 | Hum | CUAACAGUUAUCUUUGACU | AGUCAAAGAUAACUGUUAG | [2455-2473] | — | — | — | — |
| 484 | Hum | GGGCAUCGAUGUAGAACUG | CAGUUCUACAUCGAUGCCC | [2422-2440] | — | — | — | — |
| 485 | Hum | UCCUGGAGUUGUCACCACU | AGUGGUGACAACUCCAGGA | [2385-2403] | — | — | — | — |
| 486 | Hum | UUGUUAAGCUCCAAAGGUU | AACCUUUGGAGCUUAACAA | [2347-2365] | — | — | — | — |
| 487 | Hum | UUGCAUGUCUAUUGUUAAG | CUUAACAAUAGACAUGCAA | [2336-2354] | — | — | — | — |
| 488 | Hum | AUGUUGUUUUGCAUGUCUA | UAGACAUGCAAAACAACAU | [2328-2346] | — | — | — | — |
| 489 | Hum | AAGAUACUACAAAGCCAAU | AUUGGCUUUGUAGUAUCUU | [2281-2299] | [1571-1581](11/11) | — | — | — |
| 490 | Hum | CUUGGAAAGAUACUACAAA | UUUGUAGUAUCUUUCCAAG | [2275-2293] | — | — | — | — |
| 491 | Hum | UGUCACUGUUCAAAUUAGC | GCUAAUUUGAACAGUGACA | [2225-2243] | — | — | — | — |
| 492 | Hum | UGAUACUAUAAGUGACCUA | UAGGUCACUUAUAGUAUCA | [2203-2221] | — | — | — | — |
| 493 | Hum, ms, rat, chimp | CCGUUGACCAUGGUUGCAA | UUGCAACCAUGGUCAACGG | [195-213] | [193-211] | [74-92] | [315-333] | [177-195](18/19) |
| 494 | Hum | GUGUUACUGAAAAACAGGU | ACCUGUUUUUCAGUAACAC | [2171-2189] | — | — | — | — |
| 495 | Hum | AGGGACAGAUGUAUUCAUC | GAUGAAUACAUCUGUCCCU | [2149-2167] | — | — | — | — |
| 496 | Hum | GGCGUAGGGACAGAUGUAU | AUACAUCUGUCCCUACGCC | [2144-2162] | — | — | — | — |
| 497 | Hum | CUCCACUUCACAUGCUGGA | UCCAGCAUGUGAAGUGGAG | [2121-2139] | — | — | — | — |
| 498 | Hum | UUCCUGCCCUAGCUAUUAG | CUAAUAGCUAGGGCAGGAA | [2102-2120] | — | — | — | — |
| 499 | Hum | AGGAGCUUAUUCAGGUUUC | GAAACCUGAAUAAGCUCCU | [2086-2104] | — | — | — | — |
| 500 | Hum | AUAAGGAGCUUAUUCAGGU | ACCUGAAUAAGCUCCUUAU | [2083-2101] | — | — | — | — |
| 501 | Hum, chimp | CAACUUGCCAGAAUUUGGU | ACCAAAUUCUGGCAAGUUG | [358-376] | [356-374](18/19) | [237-255](18/19) | [478-496] | [340-357](17/18) |
| 502 | Hum | AAUUCAGCAAGGCUUUCAU | AUGAAAGCCUUGCUGAAUU | [2044-2062] | [2157-2167](11/11) | — | — | — |
| 503 | Hum | UCAACAAUGUUCAAUUCAG | CUGAAUUGAACAUUGUUGA | [2032-2050] | — | — | — | — |
| 504 | Hum | UCCACUCAACAAUGUUCAA | UUGAACAUUGUUGAGUGGA | [2027-2045] | — | — | — | — |
| 505 | Hum | UUCCAACUAAGUAGAUCAU | AUGAUCUACUUAGUUGGAA | [1969-1987] | — | — | — | — |
| 506 | Hum | AGGGAAUAAUAAAGGCCUU | AAGGCCUUUAUUAUUCCCU | [1937-1955] | — | — | — | — |
| 507 | Hum | CACUAGGGAAUAAUAAAGG | CCUUUAUUAUUCCCUAGUG | [1933-1951] | — | — | — | — |
| 508 | Hum, chimp | GAGGAAUCAACUUGCCAGA | UCUGGCAAGUUGAUUCCUC | [351-369] | — | — | [471-489] | [340-351](12/12) |
| 509 | Hum | CCUGUCACUAGGGAAUAAU | AUUAUUCCCUAGUGACAGG | [1928-1946] | — | — | — | — |
| 510 | Hum | CAUGCAUGCACCCAGAUUU | AAAUCUGGGUGCAUGCAUG | [1894-1912] | — | — | — | — |
| 511 | Hum | GUCCAGAUAACCAUGCAUG | CAUGCAUGGUUAUCUGGAC | [1883-1901] | — | — | — | — |
| 512 | Hum | CCGUCCAGAUAACCAUGCA | UGCAUGGUUAUCUGGACGG | [1881-1899] | — | — | — | — |
| 513 | Hum | GAAUGAAACUCACCGUCCA | UGGACGGUGAGUUUCAUUC | [1869-1887] | — | — | — | — |
| 514 | Hum | GAGAAUGAAACUCACCGUC | GACGGUGAGUUUCAUUCUC | [1867-1885] | — | — | — | — |
| 515 | Hum | ACAGCCUAGAGAAUGAAAC | GUUUCAUUCUCUAGGCUGU | [1859-1877] | — | — | — | — |
| 516 | Hum | CUGCAUUGGCUAUGGAGAU | AUCUCCAUAGCCAAUGCAG | [1828-1846] | — | — | — | — |
| 517 | Hum | AGUCUGCAUUGGCUAUGGA | UCCAUAGCCAAUGCAGACU | [1825-1843] | — | — | — | — |
| 518 | Hum | AAGUCUGCAUUGGCUAUGG | CCAUAGCCAAUGCAGACUU | [1824-1842] | — | — | — | — |
| 519 | Hum | UUGAAUUAUUGAAACGGGU | ACCCGUUUCAAUAAUUCAA | [1796-1814] | — | — | — | — |
| 520 | Hum | GCUGUAUACUACCACUUUG | CAAAGUGGUAGUAUACAGC | [1780-1798] | — | — | — | — |
| 521 | Hum | AAGGGUAGUAGCUGUAUAC | GUAUACAGCUACUACCCUU | [1770-1788] | — | — | — | — |
| 522 | Hum | GAAGUAUCUCUCCUUAACC | GGUUAAGGAGAGAUACUUC | [1742-1760] | — | — | — | — |
| 523 | Hum | UUCUGGGAAUUGAAGUAUC | GAUACUUCAAUUCCCAGAA | [1731-1749] | — | — | — | — |
| 524 | Hum, chimp | AACCCAACCUCAACGAGGU | ACCUCGUUGAGGUUGGGUU | [325-343] | [325-341](17/17) | [206-222](17/17) | [445-463] | [307-325](18/19) |
| 525 | Hum | AUGAACCAUUUCACCAUGG | CCAUGGUGAAAUGGUUCAU | [1688-1706] | — | — | — | — |
| 526 | Hum | AGAUGAACCAUUUCACCAU | AUGGUGAAAUGGUUCAUCU | [1686-1704] | — | — | — | — |
| 527 | Hum | AAUCUCAGAUGAACCAUUU | AAAUGGUUCAUCUGAGAUU | [1680-1698] | — | — | — | — |
| 528 | Hum | UGUGCUUAAUCUCAGAUGA | UCAUCUGAGAUUAAGCACA | [1673-1691] | — | — | — | — |
| 529 | Hum | AUGUGCUUAAUCUCAGAUG | CAUCUGAGAUUAAGCACAU | [1672-1690] | — | — | — | — |
| 530 | Hum | ACAUGUGCUUAAUCUCAGA | UCUGAGAUUAAGCACAUGU | [1670-1688] | — | — | — | — |
| 531 | Hum | UACAUGUGCUUAAUCUCAG | CUGAGAUUAAGCACAUGUA | [1669-1687] | — | — | — | — |
| 532 | Hum | CCUCUUUUCAGUAUUACAU | AUGUAAUACUGAAAAGAGG | [1655-1673] | — | — | — | — |
| 533 | Hum | CUCUCUGAUUCACUUAGUA | UACUAAGUGAAUCAGAGAG | [1630-1648] | — | — | — | — |
| 534 | Hum, chimp | AUGUUGUUCCUGAACCCAA | UUGGGUUCAGGAACAACAU | [313-331] | — | — | [433-451] | — |
| 535 | Hum | CCCUGUUCUUAAGUGUUGA | UCAACACUUAAGAACAGGG | [1485-1503] | — | — | — | — |
| 536 | Hum | AUGCCUUUAUAAGCUCAGU | ACUGAGCUUAUAAAGGCAU | [1463-1481] | — | — | — | — |
| 537 | Hum, chimp | CUGGGAUUAUGUUGUUCCU | AGGAACAACAUAAUCCCAG | [305-323] | [303-317](15/15) | [184-195](12/12) | [425-443] | — |
| 538 | Hum | CUAAUGUUUUAAAGAGGCA | UGCCUCUUUAAAACAUUAG | [1399-1417] | — | — | — | — |
| 539 | Hum, chimp | UUGACUACUGGGAUUAUGU | ACAUAAUCCCAGUAGUCAA | [298-316] | [298-314](17/17) | [179-195](17/17) | [418-436] | [280-295](16/16) |
| 540 | Hum | UGAGAAAUAUUACGGCAAU | AUUGCCGUAAUAUUUCUCA | [1341-1359] | — | — | — | — |
| 541 | Hum | AUGAGAAAUAUUACGGCAA | UUGCCGUAAUAUUUCUCAU | [1340-1358] | — | — | — | — |
| 542 | Hum | GGUAAGAGUAAAUGAGAAA | UUUCUCAUUUACUCUUACC | [1329-1347] | — | — | — | — |
| 543 | Hum | CUAGGUAAGAGUAAAUGAG | CUCAUUUACUCUUACCUAG | [1326-1344] | — | — | — | — |
| 544 | Hum | AACCCUAGGUAAGAGUAAA | UUUACUCUUACCUAGGGUU | [1322-1340] | — | — | — | — |
| 545 | Hum | GGUGAGUUUAAUUAAAGCU | AGCUUUAAUUAAACUCACC | [1302-1320] | — | — | — | — |
| 546 | Hum | UAGACAGGAAGGUAGGAUU | AAUCCUACCUUCCUGUCUA | [1278-1296] | — | — | — | — |
| 547 | Hum | UGACUCAAAUUUGAAGGGU | ACCCUUCAAAUUUGAGUCA | [1256-1274] | — | — | — | — |
| 548 | Hum | CUGACUCAAAUUUGAAGGG | CCCUUCAAAUUUGAGUCAG | [1255-1273] | — | — | — | — |
| 549 | Hum | CACCAGUUCCUGACUCAAA | UUUGAGUCAGGAACUGGUG | [1246-1264] | — | — | — | — |
| 550 | Hum | ACCACCAGUUCCUGACUCA | UGAGUCAGGAACUGGUGGU | [1244-1262] | — | — | — | — |
| 551 | Hum | AAAGCCCACACCACCAGUU | AACUGGUGGUGUGGGCUUU | [1235-1253] | — | — | — | — |
| 552 | Hum | UAGGCUUGGUAAUAGACUA | UAGUCUAUUACCAAGCCUA | [1100-1118] | — | — | — | — |
| 553 | Hum | CAAUUUGGUUUCAGGUAGG | CCUACCUGAAACCAAAUUG | [1085-1103] | — | — | — | — |
| 554 | Hum | AGCCCAUUUGAGUUUUACA | UGUAAAACUCAAAUGGGCU | [1056-1074] | — | — | — | — |
| 555 | Hum, chimp | GCCUGCUAAGUGAUUUUGA | UCAAAAUCACUUAGCAGGC | [283-301] | [283-296](14/14) | [164-177](14/14) | [403-421] | — |
| 556 | Hum | AGCAAAAGUAGAAGCCCAU | AUGGGCUUCUACUUUUGCU | [1044-1062] | — | — | — | — |
| 557 | Hum | GUAAGCAAAAGUAGAAGCC | GGCUUCUACUUUUGCUUAC | [1041-1059] | — | — | — | — |
| 558 | Hum, chimp | GAGAGCCUGCUAAGUGAUU | AAUCACUUAGCAGGCUCUC | [279-297] | [283-295](13/13) | [164-176](13/13) | [399-417] | [263-279](16/17) |
| 559 | Hum | GCAUAGAUCCCAUUUUUGU | ACAAAAAUGGGAUCUAUGC | [998-1016] | — | — | — | — |
| 560 | Hum | AGUGUAGAUUUUCUGCAUA | UAUGCAGAAAAUCUACACU | [984-1002] | — | — | — | — |
| 561 | Hum | UGGAGAAGUGAUUCAAAAU | AUUUUGAAUCACUUCUCCA | [965-983] | — | — | — | — |
| 562 | Hum | ACUGCAGCUAACAGGCUGA | UCAGCCUGUUAGCUGCAGU | [934-952] | — | — | — | — |
| 563 | Hum | CUGUGUUUCACAUUCAUAG | CUAUGAAUGUGAAACACAG | [913-931] | — | — | — | — |
| 564 | Hum | UUCUGUGUUUCACAUUCAU | AUGAAUGUGAAACACAGAA | [911-929] | — | — | — | — |
| 565 | Hum | CCCAAAUGUAGUCUCUUUU | AAAAGAGACUACAUUUGGG | [890-908] | — | — | — | — |
| 566 | Hum | CCCCAAAUGUAGUCUCUUU | AAAGAGACUACAUUUGGGG | [889-907] | — | — | — | — |
| 567 | Hum | AACCCCAAAUGUAGUCUCU | AGAGACUACAUUUGGGGUU | [887-905] | — | — | — | — |
| 568 | Hum | CUGCCCUAAAUAAGAAACC | GGUUUCUUAUUUAGGGCAG | [872-890] | — | — | — | — |
| 569 | Hum | ACCUGCCCUAAAUAAGAAA | UUUCUUAUUUAGGGCAGGU | [870-888] | — | — | — | — |
| 570 | Hum | CCCACCUGCCCUAAAUAAG | CUUAUUUAGGGCAGGUGGG | [867-885] | — | — | — | — |
| 571 | Hum | CUCACUGAUUGGAACAACA | UGUUGUUCCAAUCAGUGAG | [749-767] | [751-761](11/11) | [632-642](11/11) | — | [736-749](14/14) |
| 572 | Hum | CUCAGGAUUUCGACUUGUU | AACAAGUCGAAAUCCUGAG | [716-734] | [714-731](18/18) | [599-613](15/15) | — | — |
| 573 | Hum, ms | GCUCAGGAUUUCGACUUGU | ACAAGUCGAAAUCCUGAGC | [715-733] | [713-731] | [594-612](18/19) | — | — |
| 574 | Hum, ms | AGCUCAGGAUUUCGACUUG | CAAGUCGAAAUCCUGAGCU | [714-732] | [712-730] | [593-611](18/19) | — | — |
| 575 | Hum | AGGAGAACUCUGAUCCUCA | UGAGGAUCAGAGUUCUCCU | [696-714] | — | [579-593](15/15) | — | — |
| 576 | Hum, chimp | GGCAGUUUGAGCAGCAAGA | UCUUGCUGCUCAAACUGCC | [216-234] | [214-232](18/19) | [95-113](18/19) | [336-354] | [198-216](18/19) |
| 577 | Hum, chimp | UGAGCUUACACUUGUGUUU | AAACACAAGUGUAAGCUCA | [605-623] | — | — | [725-743] | [588-605](17/18) |
| 578 | Hum, chimp | UUUGAGCUUACACUUGUGU | ACACAAGUGUAAGCUCAAA | [603-621] | — | — | [723-741] | — |
| 579 | Hum | GUGUGUGAUUCUAGCGUCG | CGACGCUAGAAUCACACAC | [576-594] | — | — | [696-714](18/19) | [558-571](14/14) |
| 580 | Hum | UUGUGUGUGAUUCUAGCGU | ACGCUAGAAUCACACACAA | [574-592] | — | [453-468](15/16) | [694-709](16/16) | [556-571](16/16) |
| 581 | Hum, rat, chimp | UGGAUAGGAUUGUGUGUGA | UCACACACAAUCCUAUCCA | [565-583] | — | [444-462] | [685-703] | [547-565](18/19) |
| 582 | Hum, rat, chimp | AAAAGCUGGAUAGGAUUGU | ACAAUCCUAUCCAGCUUUU | [559-577] | [557-572](16/16) | [438-456] | [679-697] | [541-559](18/19) |
| 583 | Hum, ms, chimp, dog | GUAUGUAAAAAGCUGGAUA | UAUCCAGCUUUUUACAUAC | [552-570] | [550-568] | [434-449](16/16) | [672-690] | [534-552] |
| 584 | Hum, ms, chimp | AUGUAUGUAAAAAGCUGGA | UCCAGCUUUUUACAUACAU | [550-568] | [548-566] | [429-447](18/19) | [670-688] | [534-550](17/17) |
| 585 | Hum, ms, chimp | CUGACCCAGAGAAUUGCUC | GAGCAAUUCUCUGGGUCAG | [453-471] | [451-469] | [332-348](17/17) | [573-591] | [435-453](18/19) |
| 586 | Hum, chimp | AUGGUUGCAACUGGCAGUU | AACUGCCAGUUGCAACCAU | [204-222] | [202-220](18/19) | [83-101](18/19) | [324-342] | [186-204](18/19) |
| 587 | Hum | UGGAAGGCUGUUAAAUUAA | UUAAUUUAACAGCCUUCCA | [2511-2529] | — | — | — | — |
| 588 | Hum | GCUUAUGGAAGGCUGUUAA | UUAACAGCCUUCCAUAAGC | [2506-2524] | — | — | — | — |
| 589 | Hum, chimp, dog | CUGUCUGUCCAAAUCAAAG | CUUUGAUUUGGACAGACAG | [392-410] | [390-408](18/19) | [271-289](18/19) | [512-530] | [374-392] |
| 590 | Hum | AUGUAGAACUGUUGUCCUU | AAGGACAACAGUUCUACAU | [2430-2448] | — | — | — | — |
| 591 | Hum | GCAUCGAUGUAGAACUGUU | AACAGUUCUACAUCGAUGC | [2424-2442] | — | — | — | — |
| 592 | Hum | AAUGUUGUUUUGCAUGUCU | AGACAUGCAAAACAACAUU | [2327-2345] | — | — | — | — |
| 593 | Hum | UGGGCCAAGAUAAAUCAAU | AUUGAUUUAUCUUGGCCCA | [2311-2329] | — | — | — | — |
| 594 | Hum | GAAUUGGGCCAAGAUAAAU | AUUUAUCUUGGCCCAAUUC | [2307-2325] | — | — | — | — |
| 595 | Hum | AGAAUUGGGCCAAGAUAAA | UUUAUCUUGGCCCAAUUCU | [2306-2324] | — | — | — | — |
| 596 | Hum | CUCUUCAAAUGCUUGGAAA | UUUCCAAGCAUUUGAAGAG | [2264-2282] | — | — | — | — |
| 597 | Hum | ACUCUUCAAAUGCUUGGAA | UUCCAAGCAUUUGAAGAGU | [2263-2281] | — | — | — | — |
| 598 | Hum | GUCACUGUUCAAAUUAGCC | GGCUAAUUUGAACAGUGAC | [2226-2244] | — | — | — | — |
| 599 | Hum | GUGACCUAAAAUGUCACUG | CAGUGACAUUUUAGGUCAC | [2214-2232] | — | — | — | — |
| 600 | Hum | CUGAUACUAUAAGUGACCU | AGGUCACUUAUAGUAUCAG | [2202-2220] | — | — | — | — |
| 601 | Hum | ACUGAUACUAUAAGUGACC | GGUCACUUAUAGUAUCAGU | [2201-2219] | — | — | — | — |
| 602 | Hum | UACUGAUACUAUAAGUGAC | GUCACUUAUAGUAUCAGUA | [2200-2218] | — | — | — | — |
| 603 | Hum | GAUCCUGUUACUGAUACUA | UAGUAUCAGUAACAGGAUC | [2192-2210] | — | — | — | — |
| 604 | Hum | GGUGUGAUCCUGUUACUGA | UCAGUAACAGGAUCACACC | [2187-2205] | — | — | — | — |
| 605 | Hum | CUGAAAAACAGGUGUGAUC | GAUCACACCUGUUUUUCAG | [2177-2195] | — | — | — | — |
| 606 | Hum | UGGUGUUACUGAAAAACAG | CUGUUUUUCAGUAACACCA | [2169-2187] | — | — | — | — |
| 607 | Hum | CUGGUGUUACUGAAAAACA | UGUUUUUCAGUAACACCAG | [2168-2186] | — | — | — | — |
| 608 | Hum | UCCUGGUGUUACUGAAAAA | UUUUUCAGUAACACCAGGA | [2166-2184] | — | — | — | — |
| 609 | Hum | ACAGAUGUAUUCAUCCUGG | CCAGGAUGAAUACAUCUGU | [2153-2171] | — | — | — | — |
| 610 | Hum | GACAGAUGUAUUCAUCCUG | CAGGAUGAAUACAUCUGUC | [2152-2170] | — | — | — | — |
| 611 | Hum | GCGUAGGGACAGAUGUAUU | AAUACAUCUGUCCCUACGC | [2145-2163] | — | — | — | — |
| 612 | Hum | UCCUGCCCUAGCUAUUAGC | GCUAAUAGCUAGGGCAGGA | [2103-2121] | — | — | — | — |
| 613 | Hum | GUGGAUAAGGAGCUUAUUC | GAAUAAGCUCCUUAUCCAC | [2079-2097] | — | — | — | — |
| 614 | Hum | UGCUGUGGGUCGUGGAUAA | UUAUCCACGACCCACAGCA | [2068-2086] | — | — | — | — |
| 615 | Hum, chimp | GAAUCAACUUGCCAGAAUU | AAUUCUGGCAAGUUGAUUC | [354-372] | — | — | [474-492] | [340-351](12/12) |
| 616 | Hum | CCAACUAAGUAGAUCAUUA | UAAUGAUCUACUUAGUUGG | [1971-1989] | — | — | — | — |
| 617 | Hum | AAAGGCCUUAUUUUUUGUC | GACAAAAAAUAAGGCCUUU | [1947-1965] | — | — | — | — |
| 618 | Hum | GGAAUAAUAAAGGCCUUAU | AUAAGGCCUUUAUUAUUCC | [1939-1957] | — | — | — | — |
| 619 | Hum | GGGAAUAAUAAAGGCCUUA | UAAGGCCUUUAUUAUUCCC | [1938-1956] | — | — | — | — |
| 620 | Hum | AACCAUGCAUGCACCCAGA | UCUGGGUGCAUGCAUGGUU | [1891-1909] | — | — | — | — |
| 621 | Hum | CAGAUAACCAUGCAUGCAC | GUGCAUGCAUGGUUAUCUG | [1886-1904] | — | — | — | — |
| 622 | Hum | CUCACCGUCCAGAUAACCA | UGGUUAUCUGGACGGUGAG | [1877-1895] | — | — | — | — |
| 623 | Hum | AUGAAACUCACCGUCCAGA | UCUGGACGGUGAGUUUCAU | [1871-1889] | — | — | — | — |
| 624 | Hum | AGAGAAUGAAACUCACCGU | ACGGUGAGUUUCAUUCUCU | [1866-1884] | — | — | — | — |
| 625 | Hum | GUACAGCCUAGAGAAUGAA | UUCAUUCUCUAGGCUGUAC | [1857-1875] | — | — | — | — |
| 626 | Hum | AUGGUUUAUAGUACAGCCU | AGGCUGUACUAUAAACCAU | [1847-1865] | — | — | — | — |
| 627 | Hum | AUGGAGAUAUGGUUUAUAG | CUAUAAACCAUAUCUCCAU | [1839-1857] | — | — | — | — |
| 628 | Hum | UGGCUAUGGAGAUAUGGUU | AACCAUAUCUCCAUAGCCA | [1834-1852] | — | — | — | — |
| 629 | Hum | UGCAUUGGCUAUGGAGAUA | UAUCUCCAUAGCCAAUGCA | [1829-1847] | — | — | — | — |
| 630 | Hum | GUAUACUACCACUUUGAAU | AUUCAAAGUGGUAGUAUAC | [1783-1801] | — | — | — | — |
| 631 | Hum | AGCUGUAUACUACCACUUU | AAAGUGGUAGUAUACAGCU | [1779-1797] | — | — | — | — |
| 632 | Hum | GGUAGUAGCUGUAUACUAC | GUAGUAUACAGCUACUACC | [1773-1791] | — | — | — | — |
| 633 | Hum | CAAGGGUAGUAGCUGUAUA | UAUACAGCUACUACCCUUG | [1769-1787] | — | — | — | — |
| 634 | Hum | UCCUUAACCCCAAUUGUCA | UGACAAUUGGGGUUAAGGA | [1752-1770] | — | — | — | — |
| 635 | Hum | AAGUAUCUCUCCUUAACCC | GGGUUAAGGAGAGAUACUU | [1743-1761] | — | — | — | — |
| 636 | Hum | UCUGGGAAUUGAAGUAUCU | AGAUACUUCAAUUCCCAGA | [1732-1750] | — | — | — | — |
| 637 | Hum | UUUCUGGGAAUUGAAGUAU | AUACUUCAAUUCCCAGAAA | [1730-1748] | — | — | — | — |
| 638 | Hum | GGCAGUGUUAUCUCAUCUC | GAGAUGAGAUAACACUGCC | [1705-1723] | — | — | — | — |
| 639 | Hum | AUGGCAGUGUUAUCUCAUC | GAUGAGAUAACACUGCCAU | [1703-1721] | — | — | — | — |
| 640 | Hum | CACCAUGGCAGUGUUAUCU | AGAUAACACUGCCAUGGUG | [1699-1717] | — | — | — | — |
| 641 | Hum | UGCUUAAUCUCAGAUGAAC | GUUCAUCUGAGAUUAAGCA | [1675-1693] | — | — | — | — |
| 642 | Hum | CAUGUGCUUAAUCUCAGAU | AUCUGAGAUUAAGCACAUG | [1671-1689] | — | — | — | — |
| 643 | Hum | UUACAUGUGCUUAAUCUCA | UGAGAUUAAGCACAUGUAA | [1668-1686] | — | — | — | — |
| 644 | Hum | CAGUAUUACAUGUGCUUAA | UUAAGCACAUGUAAUACUG | [1663-1681] | — | — | — | — |
| 645 | Hum | UCACUUAGUAAUCUAUCCU | AGGAUAGAUUACUAAGUGA | [1639-1657] | — | — | — | — |
| 646 | Hum | CUGUGAGGAUAGGAAAUUA | UAAUUUCCUAUCCUCACAG | [1594-1612] | — | — | — | — |
| 647 | Hum | AGUGUUGAAUACUGUCUUU | AAAGACAGUAUUCAACACU | [1496-1514] | — | — | — | — |
| 648 | Hum | UAAGUGUUGAAUACUGUCU | AGACAGUAUUCAACACUUA | [1494-1512] | — | — | — | — |
| 649 | Hum | CUGUUCUUAAGUGUUGAAU | AUUCAACACUUAAGAACAG | [1487-1505] | — | — | — | — |
| 650 | Hum | CCUGUUCUUAAGUGUUGAA | UUCAACACUUAAGAACAGG | [1486-1504] | — | — | — | — |
| 651 | Hum | GAUGCCUUUAUAAGCUCAG | CUGAGCUUAUAAAGGCAUC | [1462-1480] | — | — | — | — |
| 652 | Hum | UAGAUGCCUUUAUAAGCUC | GAGCUUAUAAAGGCAUCUA | [1460-1478] | — | — | — | — |
| 653 | Hum | GGUGUUGUUUUAGAUGCCU | AGGCAUCUAAAACAACACC | [1450-1468] | — | — | — | — |
| 654 | Hum | UAAAGAGGCAACAAAAGCU | AGCUUUUGUUGCCUCUUUA | [1408-1426] | — | — | — | — |
| 655 | Hum | GUUUUAAAGAGGCAACAAA | UUUGUUGCCUCUUUAAAAC | [1404-1422] | — | — | — | — |
| 656 | Hum | AUGUUUUAAAGAGGCAACA | UGUUGCCUCUUUAAAACAU | [1402-1420] | — | — | — | — |
| 657 | Hum | GCUUCACUGUUUCUUGGUG | CACCAAGAAACAGUGAAGC | [1369-1387] | — | — | — | [1333-1346] |
| | | | | | | | | (14/14) |
| 658 | Hum | GAGAAAUAUUACGGCAAUA | UAUUGCCGUAAUAUUUCUC | [1342-1360] | — | — | — | — |
| 659 | Hum | ACUCAAAUUUGAAGGGUUU | AAACCCUUCAAAUUUGAGU | [1258-1276] | — | — | — | — |
| 660 | Hum, chimp | AAGUGAUUUUGACUACUGG | CCAGUAGUCAAAAUCACUU | [290-308] | — | — | [410-428] | [275-290](16/16) |
| 661 | Hum, chimp | UAAGUGAUUUUGACUACUG | CAGUAGUCAAAAUCACUUA | [289-307] | — | — | [409-427] | [275-289](15/15) |
| 662 | Hum | CACAGAAUCAUACUAAAUG | CAUUUAGUAUGAUUCUGUG | [1192-1210] | — | — | — | — |
| 663 | Hum, chimp | GCUAAGUGAUUUUGACUAC | GUAGUCAAAAUCACUUAGC | [287-305] | [285-303](18/19) | [166-184](18/19) | [407-425] | [269-287](18/19) |
| 664 | Hum | CAGGUAGGCUUGGUAAUAG | CUAUUACCAAGCCUACCUG | [1096-1114] | — | — | — | — |
| 665 | Hum | UGGGAUGGAAUAGGUAAGC | GCUUACCUAUUCCAUCCCA | [1028-1046] | — | — | — | — |
| 666 | Hum | AUGGGAUGGAAUAGGUAAG | CUUACCUAUUCCAUCCCAU | [1027-1045] | — | — | — | — |
| 667 | Hum | UAGUCUCUUUUCUUUCUGU | ACAGAAAGAAAAGAGACUA | [898-916] | — | — | — | — |
| 668 | Hum | AAGAAACCCCAAAUGUAGU | ACUACAUUUGGGGUUUCUU | [883-901] | — | — | — | [866-878](13/13) |
| 669 | Hum | CCCUAAAUAAGAAACCCCA | UGGGGUUUCUUAUUUAGGG | [875-893] | — | — | — | — |
| 670 | Hum | GAACAACAGUGAUUGAAGG | CCUUCAAUCACUGUUGUUC | [760-778] | — | — | — | — |
| 671 | Hum | CUGAUUGGAACAACAGUGA | UCACUGUUGUUCCAAUCAG | [753-771] | [751-767](16/17) | [632-648](16/17) | — | [736-751](16/16) |
| 672 | Hum | GAUCCUCAGCUCAGGAUUU | AAAUCCUGAGCUGAGGAUC | [707-725] | [709-723](15/15) | [586-604](18/19) | — | — |
| 673 | Hum | UUCAGGAGAACUCUGAUCC | GGAUCAGAGUUCUCCUGAA | [693-711] | — | [579-590](12/12) | — | — |
| 674 | Hum | UAGUAGAGGUCGCUUCUCC | GGAGAAGCGACCUCUACUA | [668-686] | [670-684](15/15) | [552-564](13/13) | — | [657-667](11/11) |
| 675 | Hum, chimp | GCUUCAGGGACUUUUUCUU | AAGAAAAAGUCCCUGAAGC | [649-667] | — | — | [769-787] | — |
| 676 | Hum, chimp, dog | AAGCAGGAGAACUGCUCAU | AUGAGCAGUUCUCCUGCUU | [624-642] | — | — | [744-762] | [606-624] |
| 677 | Hum, chimp | GAGCUUACACUUGUGUUUA | UAAACACAAGUGUAAGCUC | [606-624] | — | — | [726-744] | [588-606](18/19) |
| 678 | Hum | GUGUGAUUCUAGCGUCGUA | UACGACGCUAGAAUCACAC | [578-596] | — | — | [698-715](17/18) | [560-571](12/12) |
| 679 | Hum, chimp | AGGAUUGUGUGUGAUUCUA | UAGAAUCACACACAAUCCU | [570-588] | — | [449-463](15/15) | [690-708] | [554-570](17/17) |
| 680 | Hum, chimp | GGUCCUUGUCCCUGAGAAA | UUUCUCAGGGACAAGGACC | [434-452] | [439-450](12/12) | — | [554-572] | [417-434](18/18) |
| 681 | Hum | ACAAAAUGGUGAUGGCUUA | UAAGCCAUCACCAUUUUGU | [2492-2510] | — | — | — | — |
| 682 | Hum | CUCUCUUGCCUGUUAUGCU | AGCAUAACAGGCAAGAGAG | [2472-2490] | — | — | — | — |
| 683 | Hum | AUCUUUGACUCUCUUGCCU | AGGCAAGAGAGUCAAAGAU | [2464-2482] | — | — | — | — |
| 684 | Hum | UUCCACUAACAGUUAUCUU | AAGAUAACUGUUAGUGGAA | [2450-2468] | — | — | — | — |
| 685 | Hum | UCGAUGUAGAACUGUUGUC | GACAACAGUUCUACAUCGA | [2427-2445] | — | — | — | — |
| 686 | Hum | UCUUGGGCAUCGAUGUAGA | UCUACAUCGAUGCCCAAGA | [2418-2436] | — | — | — | — |
| 687 | Hum | AAGGCUUCUUGGGCAUCGA | UCGAUGCCCAAGAAGCCUU | [2412-2430] | — | — | — | — |
| 688 | Hum | GUCUAUUGUUAAGCUCCAA | UUGGAGCUUAACAAUAGAC | [2342-2360] | — | — | — | — |
| 689 | Hum | UGUCUAUUGUUAAGCUCCA | UGGAGCUUAACAAUAGACA | [2341-2359] | — | — | — | — |
| 690 | Hum | UGCAUGUCUAUUGUUAAGC | GCUUAACAAUAGACAUGCA | [2337-2355] | — | — | — | — |
| 691 | Hum | UGUUUUGCAUGUCUAUUGU | ACAAUAGACAUGCAAAACA | [2332-2350] | — | — | — | — |
| 692 | Hum | UUGUUUUGCAUGUCUAUUG | CAAUAGACAUGCAAAACAA | [2331-2349] | — | — | — | — |
| 693 | Hum | AGUGACCUAAAAUGUCACU | AGUGACAUUUUAGGUCACU | [2213-2231] | — | — | — | — |
| 694 | Hum | GUUACUGAUACUAUAAGUG | CACUUAUAGUAUCAGUAAC | [2198-2216] | — | — | — | — |
| 695 | Hum | AAACAGGUGUGAUCCUGUU | AACAGGAUCACACCUGUUU | [2182-2200] | — | — | — | — |
| 696 | Hum | UCAUCCUGGUGUUACUGAA | UUCAGUAACACCAGGAUGA | [2163-2181] | — | — | — | — |
| 697 | Hum | GAUGUAUUCAUCCUGGUGU | ACACCAGGAUGAAUACAUC | [2156-2174] | — | — | — | — |
| 698 | Hum | CUAGCUAUUAGCUCCACUU | AAGUGGAGCUAAUAGCUAG | [2110-2128] | — | — | — | — |
| 699 | Hum | UAAGGAGCUUAUUCAGGUU | AACCUGAAUAAGCUCCUUA | [2084-2102] | — | — | — | — |
| 700 | Hum | GUCGUGGAUAAGGAGCUUA | UAAGCUCCUUAUCCACGAC | [2076-2094] | — | — | — | — |
| 701 | Hum | UGUGGGUCGUGGAUAAGGA | UCCUUAUCCACGACCCACA | [2071-2089] | — | — | — | — |
| 702 | Hum | UUCAUAUCCUUGCUGUGGG | CCCACAGCAAGGAUAUGAA | [2058-2076] | — | — | — | — |
| 703 | Hum | UAAUGAGAGAAUUUAGCCU | AGGCUAAAUUCUCUCAUUA | [2009-2027] | — | — | — | — |
| 704 | Hum | GUUAAUGAGAGAAUUUAGC | GCUAAAUUCUCUCAUUAAC | [2007-2025] | — | — | — | — |
| 705 | Hum | CUUAUUCCAACUAAGUAGA | UCUACUUAGUUGGAAUAAG | [1965-1983] | — | — | — | — |
| 706 | Hum | UUGUCUUAUUCCAACUAAG | CUUAGUUGGAAUAAGACAA | [1961-1979] | — | — | — | — |
| 707 | Hum | GUCACUAGGGAAUAAUAAA | UUUAUUAUUCCCUAGUGAC | [1931-1949] | — | — | — | — |
| 708 | Hum | CUGUCACUAGGGAAUAAUA | UAUUAUUCCCUAGUGACAG | [1929-1947] | — | — | — | — |
| 709 | Hum | CGUCCAGAUAACCAUGCAU | AUGCAUGGUUAUCUGGACG | [1882-1900] | — | — | — | — |
| 710 | Hum | UAGAGAAUGAAACUCACCG | CGGUGAGUUUCAUUCUCUA | [1865-1883] | — | — | — | — |
| 711 | Hum | CUACCACUUUGAAUUAUUG | CAAUAAUUCAAAGUGGUAG | [1788-1806] | — | — | — | — |
| 712 | Hum | UGUCAAGGGUAGUAGCUGU | ACAGCUACUACCCUUGACA | [1766-1784] | — | — | — | — |
| 713 | Hum | CUCUCCUUAACCCCAAUUG | CAAUUGGGGUUAAGGAGAG | [1749-1767] | — | — | — | — |
| 714 | Hum | GAUGAACCAUUUCACCAUG | CAUGGUGAAAUGGUUCAUC | [1687-1705] | — | — | — | — |
| 715 | Hum | UUUCAGUAUUACAUGUGCU | AGCACAUGUAAUACUGAAA | [1660-1678] | — | — | — | — |
| 716 | Hum, chimp | UUCCUGAACCCAACCUCAA | UUGAGGUUGGGUUCAGGAA | [319-337] | [319-335](16/17) | [206-216](11/11) | [439-457] | [301-319](18/19) |
| 717 | Hum | GUAAUCUAUCCUCUUUUCA | UGAAAAGAGGAUAGAUUAC | [1646-1664] | — | — | — | — |
| 718 | Hum, chimp | UUGUUCCUGAACCCAACCU | AGGUUGGGUUCAGGAACAA | [316-334] | — | — | [436-454] | [298-316](18/19) |
| 719 | Hum | GGAAAUUAGUUCUGAGAUC | GAUCUCAGAACUAAUUUCC | [1605-1623] | — | — | — | — |
| 720 | Hum | AGGAUAGGAAAUUAGUUCU | AGAACUAAUUUCCUAUCCU | [1599-1617] | — | — | — | — |
| 721 | Hum | UGUGAGGAUAGGAAAUUAG | CUAAUUUCCUAUCCUCACA | [1595-1613] | — | — | — | — |
| 722 | Hum | CCUGUGAGGAUAGGAAAUU | AAUUUCCUAUCCUCACAGG | [1593-1611] | — | — | — | — |
| 723 | Hum | CUGAUAUUUUUGUGUGUAG | CUACACACAAAAAUAUCAG | [1541-1559] | — | — | — | — |
| 724 | Hum | GUUCUUAAGUGUUGAAUAC | GUAUUCAACACUUAAGAAC | [1489-1507] | — | — | — | — |
| 725 | Hum, chimp | ACUGGGAUUAUGUUGUUCC | GGAACAACAUAAUCCCAGU | [304-322] | [302-317](16/16) | [183-195](13/13) | [424-442] | — |
| 726 | Hum | GGUGACUUCCUCACUCUAA | UUAGAGUGAGGAAGUCACC | [1384-1402] | — | — | — | — |
| 727 | Hum | UUGGUGACUUCCUCACUCU | AGAGUGAGGAAGUCACCAA | [1382-1400] | — | — | — | — |
| 728 | Hum | CACUGUUUCUUGGUGACUU | AAGUCACCAAGAAACAGUG | [1373-1391] | — | — | — | [1336-1346] |
| | | | | | | | | (11/11) |
| 729 | Hum | CUUCACUGUUUCUUGGUGA | UCACCAAGAAACAGUGAAG | [1370-1388] | — | — | — | [1333-1346] |
| | | | | | | | | (14/14) |
| 730 | Hum | UAUUACGGCAAUAAUGGAA | UUCCAUUAUUGCCGUAAUA | [1348-1366] | — | — | — | — |
| 731 | Hum | UAGGUAAGAGUAAAUGAGA | UCUCAUUUACUCUUACCUA | [1327-1345] | — | — | — | — |
| 732 | Hum | CCCUAGGUAAGAGUAAAUG | CAUUUACUCUUACCUAGGG | [1324-1342] | — | — | — | — |
| 733 | Hum | UUAGACAGGAAGGUAGGAU | AUCCUACCUUCCUGUCUAA | [1277-1295] | — | — | — | — |
| 734 | Hum, chimp | CUAAGUGAUUUUGACUACU | AGUAGUCAAAAUCACUUAG | [288-306] | [286-304](18/19) | [167-185](18/19) | [408-426] | [270-288](18/19) |
| 735 | Hum | AGAAGCCCAUUUGAGUUUU | AAAACUCAAAUGGGCUUCU | [1053-1071] | — | — | — | — |
| 736 | Hum | GUAGAAGCCCAUUUGAGUU | AACUCAAAUGGGCUUCUAC | [1051-1069] | — | — | — | — |
| 737 | Hum | AAGUAGAAGCCCAUUUGAG | CUCAAAUGGGCUUCUACUU | [1049-1067] | — | — | — | — |
| 738 | Hum | CAAAAGUAGAAGCCCAUUU | AAAUGGGCUUCUACUUUUG | [1046-1064] | — | — | — | — |
| 739 | Hum, chimp | AGCCUGCUAAGUGAUUUUG | CAAAAUCACUUAGCAGGCU | [282-300] | [283-296](14/14) | [164-177](14/14) | [402-420] | — |
| 740 | Hum | GGUAAGCAAAAGUAGAAGC | GCUUCUACUUUUGCUUACC | [1040-1058] | — | — | — | — |
| 741 | Hum | AGGUAAGCAAAAGUAGAAG | CUUCUACUUUUGCUUACCU | [1039-1057] | — | — | — | — |
| 742 | Hum | UGGAAUAGGUAAGCAAAAG | CUUUUGCUUACCUAUUCCA | [1033-1051] | — | — | — | — |
| 743 | Hum | AUGGAAUAGGUAAGCAAAA | UUUUGCUUACCUAUUCCAU | [1032-1050] | — | — | — | — |
| 744 | Hum | UUGAAUGGGAUGGAAUAGG | CCUAUUCCAUCCCAUUCAA | [1023-1041] | — | — | — | — |
| 745 | Hum, chimp | AGAGCCUGCUAAGUGAUUU | AAAUCACUUAGCAGGCUCU | [280-298] | [283-296](14/14) | [164-177](14/14) | [400-418] | [263-280](17/18) |
| 746 | Hum | UCUGCAUAGAUCCCAUUUU | AAAAUGGGAUCUAUGCAGA | [995-1013] | — | — | — | — |
| 747 | Hum | UUCUGGCCUUUGGAGAAGU | ACUUCUCCAAAGGCCAGAA | [955-973] | — | — | — | — |
| 748 | Hum | UUUCUGUGUUUCACAUUCA | UGAAUGUGAAACACAGAAA | [910-928] | — | — | — | — |
| 749 | Hum | GUAGUCUCUUUUCUUUCUG | CAGAAAGAAAAGAGACUAC | [897-915] | — | — | — | — |
| 750 | Hum | GAAACCCCAAAUGUAGUCU | AGACUACAUUUGGGGUUUC | [885-903] | — | — | — | [867-878](12/12) |
| 751 | Hum | GUAGUAAAACUAUUCAGCU | AGCUGAAUAGUUUUACUAC | [821-839] | — | — | — | — |
| 752 | Hum | GGUAGUAAAACUAUUCAGC | GCUGAAUAGUUUUACUACC | [820-838] | — | — | — | — |
| 753 | Hum | GAUUGGAACAACAGUGAUU | AAUCACUGUUGUUCCAAUC | [755-773] | — | — | — | [737-751](15/15) |
| 754 | Hum | UACUCACUGAUUGGAACAA | UUGUUCCAAUCAGUGAGUA | [747-765] | [745-761](16/17) | [626-642](16/17) | — | [736-747](12/12) |
| 755 | Hum, rat | GAUUUCGACUUGUUAAGAA | UUCUUAACAAGUCGAAAUC | [721-739] | [719-737](18/19) | [600-618] | — | — |
| 756 | Hum | AGGAUUUCGACUUGUUAAG | CUUAACAAGUCGAAAUCCU | [719-737] | [717-731](15/15) | [599-616](18/18) | — | — |
| 757 | Hum | UCAGGAGAACUCUGAUCCU | AGGAUCAGAGUUCUCCUGA | [694-712] | — | [579-591](13/13) | — | — |
| 758 | Hum, chimp | GGACUAGCUUCAGGGACUU | AAGUCCCUGAAGCUAGUCC | [643-661] | — | — | [763-781] | [625-640](16/16) |
| 759 | Hum, chimp, dog | CUCAUGGACUAGCUUCAGG | CCUGAAGCUAGUCCAUGAG | [638-656] | — | — | [758-776] | [620-638] |
| 760 | Hum, chimp, dog | GAGAACUGCUCAUGGACUA | UAGUCCAUGAGCAGUUCUC | [630-648] | — | — | [750-768] | [612-630] |
| 761 | Hum, chimp, dog | GGAGAACUGCUCAUGGACU | AGUCCAUGAGCAGUUCUCC | [629-647] | — | — | [749-767] | [611-629] |
| 762 | Hum, chimp, dog | CAGGAGAACUGCUCAUGGA | UCCAUGAGCAGUUCUCCUG | [627-645] | — | — | [747-765] | [609-627] |
| 763 | Hum, chimp | GCUUACACUUGUGUUUAAG | CUUAAACACAAGUGUAAGC | [608-626] | [613-624](12/12) | — | [728-746] | [594-608](15/15) |
| 764 | Hum, chimp | GGAUUGUGUGUGAUUCUAG | CUAGAAUCACACACAAUCC | [571-589] | — | [450-468](18/19) | [691-709] | [554-571](18/18) |
| 765 | Hum, rat, chimp | GGAUAGGAUUGUGUGUGAU | AUCACACACAAUCCUAUCC | [566-584] | — | [445-463] | [686-704] | [548-566](18/19) |
| 766 | Hum, chimp | GGUUGCAACUGGCAGUUUG | CAAACUGCCAGUUGCAACC | [206-224] | — | — | [326-344] | [192-206](15/15) |
| 767 | Hum, chimp | UAAACUUGGUUGCUCAAAG | CUUUGAGCAACCAAGUUUA | [416-434] | [415-428](14/14) | — | [536-554] | [402-415](14/14) |
| 768 | Hum | GGCUUAUGGAAGGCUGUUA | UAACAGCCUUCCAUAAGCC | [2505-2523] | — | — | — | — |
| 769 | Hum | AAAUGGUGAUGGCUUAUGG | CCAUAAGCCAUCACCAUUU | [2495-2513] | — | — | — | — |
| 770 | Hum | UCUCUUGCCUGUUAUGCUU | AAGCAUAACAGGCAAGAGA | [2473-2491] | — | — | — | — |
| 771 | Hum | UUCUUGGGCAUCGAUGUAG | CUACAUCGAUGCCCAAGAA | [2417-2435] | — | — | — | — |
| 772 | Hum | AAGCUCCAAAGGUUCACUG | CAGUGAACCUUUGGAGCUU | [2352-2370] | — | — | — | — |
| 773 | Hum | UCUAUUGUUAAGCUCCAAA | UUUGGAGCUUAACAAUAGA | [2343-2361] | — | — | — | — |
| 774 | Hum | GGGCCAAGAUAAAUCAAUG | CAUUGAUUUAUCUUGGCCC | [2312-2330] | — | — | — | — |
| 775 | Hum | UAGAAUUGGGCCAAGAUAA | UUAUCUUGGCCCAAUUCUA | [2305-2323] | — | — | — | — |
| 776 | Hum | GGAAAGAUACUACAAAGCC | GGCUUUGUAGUAUCUUUCC | [2278-2296] | [1571-1581](11/11) | — | — | — |
| 777 | Hum | UCAAAUGCUUGGAAAGAUA | UAUCUUUCCAAGCAUUUGA | [2268-2286] | — | — | — | — |
| 778 | Hum | GUUACUGAAAAACAGGUGU | ACACCUGUUUUUCAGUAAC | [2173-2191] | — | — | — | — |
| 779 | Hum | AUGUAUUCAUCCUGGUGUU | AACACCAGGAUGAAUACAU | [2157-2175] | — | — | — | — |
| 780 | Hum | CAGAUGUAUUCAUCCUGGU | ACCAGGAUGAAUACAUCUG | [2154-2172] | — | — | — | — |
| 781 | Hum | UGCCCUAGCUAUUAGCUCC | GGAGCUAAUAGCUAGGGCA | [2106-2124] | — | — | — | — |
| 782 | Hum | GAGCUUAUUCAGGUUUCCU | AGGAAACCUGAAUAAGCUC | [2088-2106] | — | — | — | — |
| 783 | Hum | GGAGCUUAUUCAGGUUUCC | GGAAACCUGAAUAAGCUCC | [2087-2105] | — | — | — | — |
| 784 | Hum | UCAUAUCCUUGCUGUGGGU | ACCCACAGCAAGGAUAUGA | [2059-2077] | — | — | — | — |
| 785 | Hum | GUUCAAUUCAGCAAGGCUU | AAGCCUUGCUGAAUUGAAC | [2040-2058] | [2152-2167](15/16) | — | — | — |
| 786 | Hum | CAACAAUGUUCAAUUCAGC | GCUGAAUUGAACAUUGUUG | [2033-2051] | — | — | — | — |
| 787 | Hum | GUCUUAUUCCAACUAAGUA | UACUUAGUUGGAAUAAGAC | [1963-1981] | — | — | — | — |
| 788 | Hum | CUAGGGAAUAAUAAAGGCC | GGCCUUUAUUAUUCCCUAG | [1935-1953] | — | — | — | — |
| 789 | Hum | UAACCAUGCAUGCACCCAG | CUGGGUGCAUGCAUGGUUA | [1890-1908] | — | — | — | — |
| 790 | Hum | AGAUAACCAUGCAUGCACC | GGUGCAUGCAUGGUUAUCU | [1887-1905] | — | — | — | — |
| 791 | Hum | AGCCUAGAGAAUGAAACUC | GAGUUUCAUUCUCUAGGCU | [1861-1879] | — | — | — | — |
| 792 | Hum | UUAUAGUACAGCCUAGAGA | UCUCUAGGCUGUACUAUAA | [1852-1870] | — | — | — | — |
| 793 | Hum | GCUAUGGAGAUAUGGUUUA | UAAACCAUAUCUCCAUAGC | [1836-1854] | — | — | — | — |
| 794 | Hum | UCUCUCCUUAACCCCAAUU | AAUUGGGGUUAAGGAGAGA | [1748-1766] | — | — | — | — |
| 795 | Hum | AUCUCUCCUUAACCCCAAU | AUUGGGGUUAAGGAGAGAU | [1747-1765] | — | — | — | — |
| 796 | Hum | CUGGGCUUUUCUGGGAAUU | AAUUCCCAGAAAAGCCCAG | [1723-1741] | — | — | — | — |
| 797 | Hum | AACCAUUUCACCAUGGCAG | CUGCCAUGGUGAAAUGGUU | [1691-1709] | — | — | — | — |
| 798 | Hum | UUCAGUAUUACAUGUGCUU | AAGCACAUGUAAUACUGAA | [1661-1679] | — | — | — | — |
| 799 | Hum | UCCUCUUUUCAGUAUUACA | UGUAAUACUGAAAAGAGGA | [1654-1672] | — | — | — | — |
| 800 | Hum | AUCCUCUUUUCAGUAUUAC | GUAAUACUGAAAAGAGGAU | [1653-1671] | — | — | — | — |
| 801 | Hum | CUAUCCUCUUUUCAGUAUU | AAUACUGAAAAGAGGAUAG | [1651-1669] | — | — | — | — |
| 802 | Hum | AAUCUAUCCUCUUUUCAGU | ACUGAAAAGAGGAUAGAUU | [1648-1666] | — | — | — | — |
| 803 | Hum | UUCACUUAGUAAUCUAUCC | GGAUAGAUUACUAAGUGAA | [1638-1656] | — | — | — | — |
| 804 | Hum | UAGGAAAUUAGUUCUGAGA | UCUCAGAACUAAUUUCCUA | [1603-1621] | — | — | — | — |
| 805 | Hum | GGAUAGGAAAUUAGUUCUG | CAGAACUAAUUUCCUAUCC | [1600-1618] | — | — | — | — |
| 806 | Hum | GAGGAUAGGAAAUUAGUUC | GAACUAAUUUCCUAUCCUC | [1598-1616] | — | — | — | — |
| 807 | Hum | GUGAGGAUAGGAAAUUAGU | ACUAAUUUCCUAUCCUCAC | [1596-1614] | — | — | — | — |
| 808 | Hum | GUAGGCUUGGUAAUAGACU | AGUCUAUUACCAAGCCUAC | [1099-1117] | — | — | — | — |
| 809 | Hum, chimp | CCUGCUAAGUGAUUUUGAC | GUCAAAAUCACUUAGCAGG | [284-302] | [283-296](14/14) | [164-177](14/14) | [404-422] | — |
| 810 | Hum | UGCAUAGAUCCCAUUUUUG | CAAAAAUGGGAUCUAUGCA | [997-1015] | — | — | — | — |
| 811 | Hum | UUCUUUCUGUGUUUCACAU | AUGUGAAACACAGAAAGAA | [907-925] | — | — | — | — |
| 812 | Hum | CAAAUGUAGUCUCUUUUCU | AGAAAAGAGACUACAUUUG | [892-910] | — | — | — | — |
| 813 | Hum | AAACCCCAAAUGUAGUCUC | GAGACUACAUUUGGGGUUU | [886-904] | — | — | — | [868-878](11/11) |
| 814 | Hum | UGCCCUAAAUAAGAAACCC | GGGUUUCUUAUUUAGGGCA | [873-891] | — | — | — | — |
| 815 | Hum | AAACUAUUCAGCUAGUCAG | CUGACUAGCUGAAUAGUUU | [827-845] | — | — | — | — |
| 816 | Hum | GUGAUUGAAGGGUCCUAAA | UUUAGGACCCUUCAAUCAC | [768-786] | — | — | — | — |
| 817 | Hum | UCAGGAUUUCGACUUGUUA | UAACAAGUCGAAAUCCUGA | [717-735] | [715-731](17/17) | [599-614](16/16) | — | — |
| 818 | Hum | UAGAGGUCGCUUCUCCUCU | AGAGGAGAAGCGACCUCUA | [671-689] | [670-686](17/17) | [552-564](13/13) | — | [657-667](11/11) |
| 819 | Hum, chimp, dog | AACUGCUCAUGGACUAGCU | AGCUAGUCCAUGAGCAGUU | [633-651] | — | — | [753-771] | [615-633] |
| 820 | Hum | GGUGAUGGCUUAUGGAAGG | CCUUCCAUAAGCCAUCACC | [2499-2517] | — | — | — | — |
| 821 | Hum | AGGCUUCUUGGGCAUCGAU | AUCGAUGCCCAAGAAGCCU | [2413-2431] | — | — | — | — |
| 822 | Hum | UAAGCUCCAAAGGUUCACU | AGUGAACCUUUGGAGCUUA | [2351-2369] | — | — | — | — |
| 823 | Hum | GGCCAAGAUAAAUCAAUGU | ACAUUGAUUUAUCUUGGCC | [2313-2331] | — | — | — | — |
| 824 | Hum | UUCAAAUGCUUGGAAAGAU | AUCUUUCCAAGCAUUUGAA | [2267-2285] | — | — | — | — |
| 825 | Hum | GGGACAGAUGUAUUCAUCC | GGAUGAAUACAUCUGUCCC | [2150-2168] | — | — | — | — |
| 826 | Hum | AGCUUAUUCAGGUUUCCUG | CAGGAAACCUGAAUAAGCU | [2089-2107] | — | — | — | — |
| 827 | Hum | AUUCCAACUAAGUAGAUCA | UGAUCUACUUAGUUGGAAU | [1968-1986] | — | — | — | — |
| 828 | Hum | AGUACAGCCUAGAGAAUGA | UCAUUCUCUAGGCUGUACU | [1856-1874] | — | — | — | — |
| 829 | Hum | AUAGUACAGCCUAGAGAAU | AUUCUCUAGGCUGUACUAU | [1854-1872] | — | — | — | — |
| 830 | Hum | GGUUUAUAGUACAGCCUAG | CUAGGCUGUACUAUAAACC | [1849-1867] | — | — | — | — |
| 831 | Hum | GAUAUGGUUUAUAGUACAG | CUGUACUAUAAACCAUAUC | [1844-1862] | — | — | — | — |
| 832 | Hum | GGAGAUAUGGUUUAUAGUA | UACUAUAAACCAUAUCUCC | [1841-1859] | — | — | — | — |
| 833 | Hum | AACCCCAAUUGUCAAGGGU | ACCCUUGACAAUUGGGGUU | [1757-1775] | — | — | — | — |
| 834 | Hum | UAUCUCUCCUUAACCCCAA | UUGGGGUUAAGGAGAGAUA | [1746-1764] | — | — | — | — |
| 835 | Hum | GUAUCUCUCCUUAACCCCA | UGGGGUUAAGGAGAGAUAC | [1745-1763] | — | — | — | — |
| 836 | Hum | UCUGGGCUUUUCUGGGAAU | AUUCCCAGAAAAGCCCAGA | [1722-1740] | — | — | — | — |
| 837 | Hum | GAACCAUUUCACCAUGGCA | UGCCAUGGUGAAAUGGUUC | [1690-1708] | — | — | — | — |
| 838 | Hum | UCUAUCCUCUUUUCAGUAU | AUACUGAAAAGAGGAUAGA | [1650-1668] | — | — | — | — |
| 839 | Hum | UGUGUGUAGUUGAUUACUC | GAGUAAUCAACUACACACA | [1551-1569] | — | — | — | — |
| 840 | Hum | CUUAAGUGUUGAAUACUGU | ACAGUAUUCAACACUUAAG | [1492-1510] | — | — | — | — |
| 841 | Hum | UCUUAAGUGUUGAAUACUG | CAGUAUUCAACACUUAAGA | [1491-1509] | — | — | — | — |
| 842 | Hum | AAACCAGAUUUGCCUAUUU | AAAUAGGCAAAUCUGGUUU | [1122-1140] | — | — | — | — |
| 843 | Hum | CCUUUGGAGAAGUGAUUCA | UGAAUCACUUCUCCAAAGG | [961-979] | — | — | — | — |
| 844 | Hum | UGGCCUUUGGAGAAGUGAU | AUCACUUCUCCAAAGGCCA | [958-976] | — | — | — | — |
| 845 | Hum | UGUAGUCUCUUUUCUUUCU | AGAAAGAAAAGAGACUACA | [896-914] | — | — | — | — |
| 846 | Hum | CUAAAUAAGAAACCCCAAA | UUUGGGGUUUCUUAUUUAG | [877-895] | — | — | — | [866-877](12/12) |
| 847 | Hum | CCUGCCCUAAAUAAGAAAC | GUUUCUUAUUUAGGGCAGG | [871-889] | — | — | — | — |
| 848 | Hum | AAACUUUACUCACUGAUUG | CAAUCAGUGAGUAAAGUUU | [741-759] | — | — | — | — |
| 849 | Hum | GAAAAAACUUUACUCACUG | CAGUGAGUAAAGUUUUUUC | [737-755] | — | — | — | — |
| 850 | Hum, rat | GGAUUUCGACUUGUUAAGA | UCUUAACAAGUCGAAAUCC | [720-738] | [718-736](18/19) | [599-617] | — | — |
| 851 | Hum | CAGGAUUUCGACUUGUUAA | UUAACAAGUCGAAAUCCUG | [718-736] | [716-731](16/16) | [599-615](17/17) | — | — |
| 852 | Hum, chimp | CUGGCAGUUUGAGCAGCAA | UUGCUGCUCAAACUGCCAG | [214-232] | [214-227](14/14) | [95-108](14/14) | [334-352] | [196-211](16/16) |
| 853 | Hum, chimp | ACUGGCAGUUUGAGCAGCA | UGCUGCUCAAACUGCCAGU | [213-231] | [214-227](14/14) | [95-108](14/14) | [333-351] | [195-211](17/17) |
| 854 | Hum, chimp | UAGGAUUGUGUGUGAUUCU | AGAAUCACACACAAUCCUA | [569-587] | — | [448-463](16/16) | [689-707] | [554-569](16/16) |
| 855 | Hum, rat, chimp | CUGGAUAGGAUUGUGUGUG | CACACACAAUCCUAUCCAG | [564-582] | [562-580](18/19) | [443-461] | [684-702] | [546-564](18/19) |
| 856 | Hum, chimp | CAAAGGUCCUUGUCCCUGA | UCAGGGACAAGGACCUUUG | [430-448] | — | — | [550-568] | [412-430](18/19) |
| 857 | Hum, chimp | GUUGCUCAAAGGUCCUUGU | ACAAGGACCUUUGAGCAAC | [424-442] | [597-607](11/11) | [478-488](11/11) | [544-562] | — |
| 858 | Hum, chimp | AAACUUGGUUGCUCAAAGG | CCUUUGAGCAACCAAGUUU | [417-435] | [415-433](18/19) | — | [537-555] | [402-415](14/14) |
| 859 | Hum | UGGUGAUGGCUUAUGGAAG | CUUCCAUAAGCCAUCACCA | [2498-2516] | — | — | — | — |
| 860 | Hum | GGAGUUGUCACCACUGACU | AGUCAGUGGUGACAACUCC | [2389-2407] | — | — | — | — |
| 861 | Hum | ACAAUGUUCAAUUCAGCAA | UUGCUGAAUUGAACAUUGU | [2035-2053] | — | — | — | — |
| 862 | Hum, chimp | UGAGGAAUCAACUUGCCAG | CUGGCAAGUUGAUUCCUCA | [350-368] | — | — | [470-488] | [340-350](11/11) |
| 863 | Hum | UGGAGAUAUGGUUUAUAGU | ACUAUAAACCAUAUCUCCA | [1840-1858] | — | — | — | — |
| 864 | Hum | CUAUGGAGAUAUGGUUUAU | AUAAACCAUAUCUCCAUAG | [1837-1855] | — | — | — | — |
| 865 | Hum | CCCCAAUUGUCAAGGGUAG | CUACCCUUGACAAUUGGGG | [1759-1777] | — | — | — | — |
| 866 | Hum | UAACCCCAAUUGUCAAGGG | CCCUUGACAAUUGGGGUUA | [1756-1774] | — | — | — | — |
| 867 | Hum | ACUUAGUAAUCUAUCCUCU | AGAGGAUAGAUUACUAAGU | [1641-1659] | — | — | — | — |
| 868 | Hum | CACUUAGUAAUCUAUCCUC | GAGGAUAGAUUACUAAGUG | [1640-1658] | — | — | — | — |
| 869 | Hum | AGGAAAUUAGUUCUGAGAU | AUCUCAGAACUAAUUUCCU | [1604-1622] | — | — | — | — |
| 870 | Hum | UGGUGACUUCCUCACUCUA | UAGAGUGAGGAAGUCACCA | [1383-1401] | — | — | — | — |
| 871 | Hum | GUUUCAGGUAGGCUUGGUA | UACCAAGCCUACCUGAAAC | [1092-1110] | — | — | — | — |
| 872 | Hum | AUAGGUAAGCAAAAGUAGA | UCUACUUUUGCUUACCUAU | [1037-1055] | — | — | — | — |
| 873 | Hum | ACAACAGUGAUUGAAGGGU | ACCCUUCAAUCACUGUUGU | [762-780] | — | — | — | — |
| 874 | Hum, chimp, dog | GAACUGCUCAUGGACUAGC | GCUAGUCCAUGAGCAGUUC | [632-650] | — | — | [752-770] | [614-632] |
| 875 | Hum, chimp, dog | GUGUUUAAGCAGGAGAACU | AGUUCUCCUGCUUAAACAC | [618-636] | [616-631](16/16) | — | [738-756] | [600-618] |
| 876 | Hum, ms, rat, chimp | GAGAAACUGACCCAGAGAA | UUCUCUGGGUCAGUUUCUC | [447-465] | [445-463] | [326-344] | [567-585] | [429-445](17/17) |
| 877 | Hum | CAAUGUUCAAUUCAGCAAG | CUUGCUGAAUUGAACAUUG | [2036-2054] | — | — | — | — |
| 878 | Hum | GGCUAUGGAGAUAUGGUUU | AAACCAUAUCUCCAUAGCC | [1835-1853] | — | — | — | — |
| 879 | Hum | AUAGGAAAUUAGUUCUGAG | CUCAGAACUAAUUUCCUAU | [1602-1620] | — | — | — | — |
| 880 | Hum | GAUAGGAAAUUAGUUCUGA | UCAGAACUAAUUUCCUAUC | [1601-1619] | — | — | — | — |
| 881 | Hum | AUAAACCAGAUUUGCCUAU | AUAGGCAAAUCUGGUUUAU | [1120-1138] | — | — | — | — |
| 882 | Hum | CAACAGUGAUUGAAGGGUC | GACCCUUCAAUCACUGUUG | [763-781] | — | — | — | — |
| 883 | Hum, chimp | UGGUUGCUCAAAGGUCCUU | AAGGACCUUUGAGCAACCA | [422-440] | [597-607](11/11) | [478-488](11/11) | [542-560] | [404-422](18/19) |
| 884 | Hum, chimp | UUGGUUGCUCAAAGGUCCU | AGGACCUUUGAGCAACCAA | [421-439] | [597-607](11/11) | [478-488](11/11) | [541-559] | [403-421](18/19) |
| 885 | Hum | AUGCUUACAAAAUGGUGAU | AUCACCAUUUUGUAAGCAU | [2486-2504] | — | — | — | — |
| 886 | Hum | CUGGAGUUGUCACCACUGA | UCAGUGGUGACAACUCCAG | [2387-2405] | — | — | — | — |
| 887 | Hum | CUCCAAAGGUUCACUGUGU | ACACAGUGAACCUUUGGAG | [2355-2373] | — | — | — | — |
| 888 | Hum, chimp | GAGGUAAUAUUUGAGGAAU | AUUCCUCAAAUAUUACCUC | [339-357] | — | — | [459-477] | [321-337](16/17) |
| 889 | Hum, chimp | ACGAGGUAAUAUUUGAGGA | UCCUCAAAUAUUACCUCGU | [337-355] | — | — | [457-475] | [321-337](16/17) |
| 890 | Hum | GUUCCUGACUCAAAUUUGA | UCAAAUUUGAGUCAGGAAC | [1251-1269] | — | — | — | — |
| 891 | Hum | CUGAUCCUCAGCUCAGGAU | AUCCUGAGCUGAGGAUCAG | [705-723] | [703-721](18/19) | [584-602](18/19) | — | — |
| 892 | Hum, chimp | AGGUAAUAUUUGAGGAAUC | GAUUCCUCAAAUAUUACCU | [340-358] | — | — | [460-478] | [322-337](15/16) |
| 893 | Hum, chimp | CGAGGUAAUAUUUGAGGAA | UUCCUCAAAUAUUACCUCG | [338-356] | — | — | [458-476] | [321-337](16/17) |
| 894 | Hum | AUCAAAACUUCCAAAAGCC | GGCUUUUGGAAGUUUUGAU | [1222-1240] | — | — | — | [1182-1200] |
| | | | | | | | | (18/19) |
| 895 | Hum | UAUCAAAACUUCCAAAAGC | GCUUUUGGAAGUUUUGAUA | [1221-1239] | — | — | — | [1182-1199] |
| | | | | | | | | (17/18) |
| 896 | Hum | CUGAUUUUCUGGCCUUUGG | CCAAAGGCCAGAAAAUCAG | [949-967] | — | — | — | — |
| 897 | Hum, chimp, dog | CACUUGUGUUUAAGCAGGA | UCCUGCUUAAACACAAGUG | [613-631] | [613-629](17/17) | — | [733-751] | [595-613] |
| 898 | Hum | UAUGCUUACAAAAUGGUGA | UCACCAUUUUGUAAGCAUA | [2485-2503] | — | — | — | — |
| 899 | Hum | GAAUUGAAGUAUCUCUCCU | AGGAGAGAUACUUCAAUUC | [1737-1755] | — | — | — | — |
| 900 | Hum | UUCCUGACUCAAAUUUGAA | UUCAAAUUUGAGUCAGGAA | [1252-1270] | — | — | — | — |
| 901 | Hum | UUCUCUAAGUUUUCAGAGG | CCUCUGAAAACUUAGAGAA | [1162-1180] | — | — | — | — |
| 902 | Hum | UGAAUGGGAUGGAAUAGGU | ACCUAUUCCAUCCCAUUCA | [1024-1042] | — | — | — | — |
| 903 | Hum | GAAGUGAUUCAAAAUAGUG | CACUAUUUUGAAUCACUUC | [969-987] | — | — | — | — |
| 904 | Hum | UUGAAGGGUCCUAAAAAGG | CCUUUUUAGGACCCUUCAA | [772-790] | — | — | — | — |
| 905 | Hum, rat | CGACUUGUUAAGAAAAAAC | GUUUUUUCUUAACAAGUCG | [726-744] | — | [605-623] | — | [708-724](16/17) |
| 906 | Hum, chimp, dog | UUGUGUUUAAGCAGGAGAA | UUCUCCUGCUUAAACACAA | [616-634] | [614-631](18/18) | — | [736-754] | [598-616] |
| 907 | Hum, chimp, dog | ACACUUGUGUUUAAGCAGG | CCUGCUUAAACACAAGUGU | [612-630] | [613-628](16/16) | — | [732-750] | [594-612] |
| 908 | Hum, chimp | UUACACUUGUGUUUAAGCA | UGCUUAAACACAAGUGUAA | [610-628] | [613-626](14/14) | — | [730-748] | [594-610](17/17) |
| 909 | Hum, ms, rat, chimp | AGAAACUGACCCAGAGAAU | AUUCUCUGGGUCAGUUUCU | [448-466] | [446-464] | [327-345] | [568-586] | [430-445](16/16) |
| 910 | Hum | CCAUGGCAGUGUUAUCUCA | UGAGAUAACACUGCCAUGG | [1701-1719] | — | — | — | — |
| 911 | Hum | AUUGAAGGGUCCUAAAAAG | CUUUUUAGGACCCUUCAAU | [771-789] | — | — | — | — |
| 912 | Hum | UGGAACAACAGUGAUUGAA | UUCAAUCACUGUUGUUCCA | [758-776] | — | — | — | [740-758](18/19) |
| 913 | Hum, chimp, dog | GCAACUGGCAGUUUGAGCA | UGCUCAAACUGCCAGUUGC | [210-228] | [208-226](18/19) | [89-107](18/19) | [330-348] | [192-210] |
| 914 | Hum, chimp | GGUAAUAUUUGAGGAAUCA | UGAUUCCUCAAAUAUUACC | [341-359] | — | — | [461-479] | [327-337](11/11) |
| 915 | Hum, ms, rat, chimp, dog | CUGAGAAACUGACCCAGAG | CUCUGGGUCAGUUUCUCAG | [445-463] | [443-461] | [324-342] | [565-583] | [427-445] |
| 916 | Hum | CUCUGGGCUUUUCUGGGAA | UUCCCAGAAAAGCCCAGAG | [1721-1739] | — | — | — | — |
| 917 | Hum | UUGGAACAACAGUGAUUGA | UCAAUCACUGUUGUUCCAA | [757-775] | — | — | — | [739-757](18/19) |
| 918 | Hum | UGAUGGCUUAUGGAAGGCU | AGCCUUCCAUAAGCCAUCA | [2501-2519] | — | — | — | — |
| 919 | Hum | GUGAUGGCUUAUGGAAGGC | GCCUUCCAUAAGCCAUCAC | [2500-2518] | — | — | — | — |
| 920 | Hum | UUGGCUAUGGAGAUAUGGU | ACCAUAUCUCCAUAGCCAA | [1833-1851] | — | — | — | — |
| 921 | Hum | CUCUUUUCUUUCUGUGUUU | AAACACAGAAAGAAAAGAG | [902-920] | — | — | — | — |
| 922 | Hum | GGAACAACAGUGAUUGAAG | CUUCAAUCACUGUUGUUCC | [759-777] | — | — | — | [741-759](18/19) |
| 923 | Hum | UCUCUGGGCUUUUCUGGGA | UCCCAGAAAAGCCCAGAGA | [1720-1738] | — | — | — | — |
| 924 | Hum | UCUCUUUUCUUUCUGUGUU | AACACAGAAAGAAAAGAGA | [901-919] | — | — | — | — |
| 925 | Hum | GUCUCUUUUCUUUCUGUGU | ACACAGAAAGAAAAGAGAC | [900-918] | — | — | — | — |

TABLE B
additional 19mers

| | | | | Hum-34222182 ORF: |
|---|---|---|---|---|
| Number | Sense siRNA | AntiSense siRNA | Other Sp | 204-785 |

| | | | | |
|---|---|---|---|---|
| 1 | CAGUGUUCUAACAAACUAA | UUAGUUUGUUAGAACACUG | | [2244-2262] 3′UTR |
| 2 | CCAGUGUUCUAACAAACUA | UAGUUUGUUAGAACACUGG | | [2243-2261] 3′UTR |
| 3 | GGCUUUUCUGGGAAUUGAA | UUCAAUUCCCAGAAAAGCC | | [1726-1744] 3′UTR |
| 4 | CGUGAACUUGGAAAUUGAA | UUCAAUUUCCAAGUUCACG | Dog, Chin, GP, Rat | [530-548] ORF |
| 5 | GGAUGGAAUAGGUAAGCAA | UUGCUUACCUAUUCCAUCC | | [1030-1048] 3′UTR |
| 6 | UAGCCAGUGUUCUAACAAA | UUUGUUAGAACACUGGCUA | | [2240-2258] 3′UTR |
| 7 | GAUUGAAGGGUCCUAAAAA | UUUUUAGGACCCUUCAAUC | | [770-788] ORF + 3′UTR |
| 8 | AGAAUUGGGCCAAGAUAAA | UUUAUCUUGGCCCAAUUCU | | [2306-2324] 3′UTR |
| 9 | UGCUGUGGGUCGUGGAUAA | UUAUCCACGACCCACAGCA | | [2068-2086] 3′UTR |
| 10 | AGGUAAGAGUAAAUGAGAA | UUCUCAUUUACUCUUACCU | | [1328-1346] 3′UTR |
| 11 | CUGUCCAAAUCAAAGCAAA | UUUGCUUUGAUUUGGACAG | Dog, Chimp | [396-414] ORF |
| 12 | UCAUGAUUGGGUAGUAAAA | UUUUACUACCCAAUCAUGA | | [811-829] 3′UTR |
| 13 | GCCAGUGUUCUAACAAACU | AGUUUGUUAGAACACUGGC | | [2242-2260] 3′UTR |
| 14 | GUGAUUGAAGGGUCCUAAA | UUUAGGACCCUUCAAUCAC | | [768-786] ORF + 3′UTR |
| 15 | GGAAGGCUGUUAAAUUAAU | AUUAAUUUAACAGCCUUCC | | [2512-2530] 3′UTR |
| 16 | GCUUAUGGAAGGCUGUUAA | UUAACAGCCUUCCAUAAGC | | [2506-2524] 3′UTR |
| 17 | UCCUGUUACUGAUACUAUA | UAUAGUAUCAGUAACAGGA | | [2194-2212] 3′UTR |
| 18 | GGUCCUUGUCCCUGAGAAA | UUUCUCAGGGACAAGGACC | Chimp | [434-452] ORF |
| 19 | UGGUUAAAAUGCUGGAGAA | UUCUCCAGCAUUUUAACCA | Chimp | [373-391] ORF |
| 20 | CCAUUGAGUGAAUGAUGAA | UUCAUCAUUCACUCAAUGG | | [1572-1590] 3′UTR |
| 21 | CAGGAUUUCGACUUGUUAA | UUAACAAGUCGAAAUCCUG | | [718-736] ORF |
| 22 | ACGUGAACUUGGAAAUUGA | UCAAUUUCCAAGUUCACGU | Dog, Chin, GP, Rat | [529-547] ORF |
| 23 | GUGUGAUCCUGUUACUGAU | AUCAGUAACAGGAUCACAC | | [2188-2206] 3′UTR |
| 24 | CGAGGUAAUAUUUGAGGAA | UUCCUCAAAUAUUACCUCG | Chimp | [338-356] ORF |
| 25 | GCUUGGAAAGAUACUACAA | UUGUAGUAUCUUUCCAAGC | | [2274-2292] 3′UTR |
| 26 | CUAAAAUGUCACUGUUCAA | UUGAACAGUGACAUUUUAG | | [2219-2237] 3′UTR |
| 27 | GUGACUUCCUCACUCUAAU | AUUAGAGUGAGGAAGUCAC | | [1385-1403] 3′UTR |
| 28 | GCCUGUUAUGCUUACAAAA | UUUUGUAAGCAUAACAGGC | | [2479-2497] 3′UTR |
| 29 | AGGUAGGCUUGGUAAUAGA | UCUAUUACCAAGCCUACCU | | [1097-1115] 3′UTR |
| 30 | GAUGAAUACCUGUGAGGAU | AUCCUCACAGGUAUUCAUC | | [1585-1603] 3′UTR |
| 31 | CUGUCACUAGGGAAUAAUA | UAUUAUUCCCUAGUGACAG | | [1929-1947] 3′UTR |
| 32 | GUUUUAAAGAGGCAACAAA | UUUGUUGCCUCUUUAAAAC | | [1404-1422] 3′UTR |
| 33 | GUGUUCUAACAAACUAAAC | GUUUAGUUUGUUAGAACAC | | [2246-2264] 3′UTR |
| 34 | GCUUGGUAAUAGACUAUAU | AUAUAGUCUAUUACCAAGC | | [1103-1121] 3′UTR |
| 35 | CAUCCUGGUGUUACUGAAA | UUUCAGUAACACCAGGAUG | | [2164-2182] 3′UTR |
| 36 | GCCUAUCAAAACUUCCAAA | UUUGGAAGUUUUGAUAGGC | | [1218-1236] 3′UTR |
| 37 | UCCUGGUGUUACUGAAAAA | UUUUUCAGUAACACCAGGA | | [2166-2184] 3′UTR |
| 38 | CCACGGUGUUGUUUUAGAU | AUCUAAAACAACACCGUGG | | [1446-1464] 3′UTR |
| 39 | GCAGUUUGAGCAGCAAGAA | UUCUUGCUGCUCAAACUGC | Chimp | [217-235] ORF |
| 40 | CUUGGAAAGAUACUACAAA | UUUGUAGUAUCUUUCCAAG | | [2275-2293] 3′UTR |
| 41 | GUGUGAUUCUAGCGUCGUA | UACGACGCUAGAAUCACAC | | [578-596] ORF |
| 42 | CUUGGGCAUCGAUGUAGAA | UUCUACAUCGAUGCCCAAG | | [2419-2437] 3′UTR |
| 43 | GGGCUUUUCUGGGAAUUGA | UCAAUUCCCAGAAAAGCCC | | [1725-1743] 3′UTR |
| 44 | AACUGUCUGUCCAAAUCAA | UUGAUUUGGACAGACAGUU | Dog, Chimp | [390-408] ORF |
| 45 | AGCCAGUGUUCUAACAAAC | GUUUGUUAGAACACUGGCU | | [2241-2259] 3′UTR |
| 46 | GAAGGGUCCUAAAAAGGGA | UCCCUUUUUAGGACCCUUC | | [774-792] ORF + 3′UTR |
| 47 | AAAGCUUAACCCUAGGUAA | UUACCUAGGGUUAAGCUUU | | [1315-1333] 3′UTR |
| 48 | ACAUGUGCUUAAUCUCAGA | UCUGAGAUUAAGCACAUGU | | [1670-1688] 3′UTR |
| 49 | UCCUCACUCUAAUGUUUUA | UAAAACAUUAGAGUGAGGA | | [1391-1409] 3′UTR |
| 50 | GAAAGAUACUACAAAGCCA | UGGCUUUGUAGUAUCUUUC | | [2279-2297] 3′UTR |
| 51 | AAGGGUUUUUAGACAGGAA | UUCCUGUCUAAAAACCCUU | | [1269-1287] 3′UTR |
| 52 | UCAUCCUGGUGUUACUGAA | UUCAGUAACACCAGGAUGA | | [2163-2181] 3′UTR |
| 53 | CCUGUUACUGAUACUAUAA | UUAUAGUAUCAGUAACAGG | | [2195-2213] 3′UTR |
| 54 | CAUAGAUCCCAUUUUUGUA | UACAAAAAUGGGAUCUAUG | | [999-1017] 3′UTR |
| 55 | AAUUGAAUGGGAUGGAAUA | UAUUCCAUCCCAUUCAAUU | | [1021-1039] 3′UTR |
| 56 | CUGUGAGGAUAGGAAAUUA | UAAUUUCCUAUCCUCACAG | | [1594-1612] 3′UTR |
| 57 | CCUAGGUAAGAGUAAAUGA | UCAUUUACUCUUACCUAGG | | [1325-1343] 3′UTR |
| 58 | CGUGGAUAAGGAGCUUAUU | AAUAAGCUCCUUAUCCACG | | [2078-2096] 3′UTR |
| 59 | CCAGAUUUGCCUAUUUUGA | UCAAAAUAGGCAAAUCUGG | | [1125-1143] 3′UTR |
| 60 | UUGGAGAAGUGAUUCAAAA | UUUUGAAUCACUUCUCCAA | | [964-982] 3′UTR |
| 61 | GAGGAAUCAACUUGCCAGA | UCUGGCAAGUUGAUUCCUC | Chimp | [351-369] ORF |
| 62 | GAGAAAUAUUACGGCAAUA | UAUUGCCGUAAUAUUUCUC | | [1342-1360] 3′UTR |
| 63 | AGAAUUGAAUGGGAUGGAA | UUCCAUCCCAUUCAAUUCU | | [1019-1037] 3′UTR |
| 64 | AUGGAAUAGGUAAGCAAAA | UUUUGCUUACCUAUUCCAU | | [1032-1050] 3′UTR |
| 65 | GUAAAAAGCUGGAUAGGAU | AUCCUAUCCAGCUUUUUAC | Chin, GP, Chimp, Rat, Ms | [556-574] ORF |
| 66 | CCACCAGUUCCUGACUCAA | UUGAGUCAGGAACUGGUGG | | [1245-1263] 3′UTR |
| 67 | CAAAUUAGCCAGUGUUCUA | UAGAACACUGGCUAAUUUG | | [2235-2253] 3′UTR |
| 68 | CUCACUGAUUGGAACAACA | UGUUGUUCCAAUCAGUGAG | | [749-767] ORF |
| 69 | UGGAGAACUGUCUGUCCAA | UUGGACAGACAGUUCUCCA | Dog, GP, Chimp, Rat | [385-403] ORF |
| 70 | UAGAAUUGGGCCAAGAUAA | UUAUCUUGGCCCAAUUCUA | | [2305-2323] 3′UTR |
| 71 | CUCUUCAAAUGCUUGGAAA | UUUCCAAGCAUUUGAAGAG | | [2264-2282] 3′UTR |
| 72 | UGUGGGUCGUGGAUAAGGA | UCCUUAUCCACGACCCACA | | [2071-2089] 3′UTR |
| 73 | CCUAAAAUGUCACUGUUCA | UGAACAGUGACAUUUUAGG | | [2218-2236] 3′UTR |
| 74 | UGAUUGAAGGGUCCUAAAA | UUUUAGGACCCUUCAAUCA | | [769-787] ORF + 3′UTR |
| 75 | GAGAAACUGACCCAGAGAA | UUCUCUGGGUCAGUUUCUC | Chin, GP, Chimp, Rat, Ms | [447-465] ORF |
| 76 | CACCAGUUCCUGACUCAAA | UUUGAGUCAGGAACUGGUG | | [1246-1264] 3′UTR |
| 77 | CAAAGGUCCUUGUCCCUGA | UCAGGGACAAGGACCUUUG | Chimp | [430-448] ORF |
| 78 | GAGUGAAUGAUGAAUACCU | AGGUAUUCAUCAUUCACUC | | [1577-1595] 3′UTR |
| 79 | CAAUAAUGGAACUGCUUCA | UGAAGCAGUUCCAUUAUUG | | [1356-1374] 3′UTR |
| 80 | CACUAACAGUUAUCUUUGA | UCAAAGAUAACUGUUAGUG | | [2453-2471] 3′UTR |
| 81 | GCGUCGUACCUACUUUUGA | UCAAAAGUAGGUACGACGC | | [589-607] ORF |
| 82 | CGGCCAGCAUUUCAGAAUU | AAUUCUGAAAUGCUGGCCG | Chimp | [238-256] ORF |
| 83 | GUGCUUAAUCUCAGAUGAA | UUCAUCUGAGAUUAAGCAC | | [1674-1692] 3′UTR |
| 84 | GUUGUGUUAUGCACGUGAA | UUCACGUGCAUAACACAAC | Ms | [517-535] ORF |
| 85 | AGUACAGCCUAGAGAAUGA | UCAUUCUCUAGGCUGUACU | | [1856-1874] 3′UTR |
| 86 | ACUGUCUGUCCAAAUCAAA | UUUGAUUUGGACAGACAGU | Dog, Chimp | [391-409] ORF |
| 87 | AGCUUACACUUGUGUUUAA | UUAAACACAAGUGUAAGCU | Chimp | [607-625] ORF |
| 88 | GAUUGGGUAGUAAAACUAU | AUAGUUUUACUACCCAAUC | | [815-833] 3′UTR |
| 89 | GUGAACUUGGAAAUUGAAA | UUUCAAUUUCCAAGUUCAC | Dog, Chin, GP, Chimp, Rat | [531-549] ORF |
| 90 | GCCAGAAUUUGGUUAAAAU | AUUUUAACCAAAUUCUGGC | GP, Chimp, Rat, Ms | [364-382] ORF |
| 91 | CUGGCAGUUUGAGCAGCAA | UUGCUGCUCAAACUGCCAG | Chimp | [214-232] ORF |
| 92 | GAAUUGAAUGGGAUGGAAU | AUUCCAUCCCAUUCAAUUC | | [1020-1038] 3′UTR |
| 93 | GUCACUAGGGAAUAAUAAA | UUUAUUAUUCCCUAGUGAC | | [1931-1949] 3′UTR |
| 94 | AGAUCUAGUCCCUCUCUGA | UCAGAGAGGGACUAGAUCU | | [1619-1637] 3′UTR |
| 95 | UCUUGGGCAUCGAUGUAGA | UCUACAUCGAUGCCCAAGA | | [2418-2436] 3′UTR |
| 96 | CCAGAGAAUUGCUCAAGAU | AUCUUGAGCAAUUCUCUGG | Chimp, Ms | [458-476] ORF |
| 97 | CCCUGUUCUUAAGUGUUGA | UCAACACUUAAGAACAGGG | | [1485-1503] 3′UTR |
| 98 | GACCCAGAGAAUUGCUCAA | UUGAGCAAUUCUCUGGGUC | Chimp, Ms | [455-473] ORF |
| 99 | UUUGGAGAAGUGAUUCAAA | UUUGAAUCACUUCUCCAAA | | [963-981] 3′UTR |
| 100 | GUGAAUGAUGAAUACCUGU | ACAGGUAUUCAUCAUUCAC | | [1579-1597] 3′UTR |
| 101 | UCAGGAUUUCGACUUGUUA | UAACAAGUCGAAAUCCUGA | | [717-735] ORF |
| 102 | AGUGAAUGAUGAAUACCUG | CAGGUAUUCAUCAUUCACU | | [1578-1596] 3′UTR |
| 103 | GACAGGAAGGUAGGAUUAA | UUAAUCCUACCUUCCUGUC | | [1280-1298] 3′UTR |
| 104 | GGGUCCUAAAAAGGGAAAA | UUUUCCCUUUUUAGGACCC | | [777-795] ORF + 3′UTR |
| 105 | GGAUAAGGAGCUUAUUCAG | CUGAAUAAGCUCCUUAUCC | | [2081-2099] 3′UTR |
| 106 | CUUAUGGAAGGCUGUUAAA | UUUAACAGCCUUCCAUAAG | | [2507-2525] 3′UTR |
| 107 | CGAAGGAAACAGAGCCGUU | AACGGCUCUGUUUCCUUCG | Chimp | [181-199] 5′UTR |
| 108 | GUUCUAACAAACUAAACUC | GAGUUUAGUUUGUUAGAAC | | [2248-2266] 3′UTR |
| 109 | AAUGGGAUGGAAUAGGUAA | UUACCUAUUCCAUCCCAUU | | [1026-1044] 3′UTR |
| 110 | CCUGUUCUUAAGUGUUGAA | UUCAACACUUAAGAACAGG | | [1486-1504] 3′UTR |
| 111 | GGCCUUAUUUUUUGUCUUA | UAAGACAAAAAAUAAGGCC | | [1950-1968] 3′UTR |
| 112 | CUCUCUGAUUCACUUAGUA | UACUAAGUGAAUCAGAGAG | | [1630-1648] 3′UTR |
| 113 | GGCAGUUUGAGCAGCAAGA | UCUUGCUGCUCAAACUGCC | Chimp | [216-234] ORF |
| 114 | CGUCGUACCUACUUUUGAG | CUCAAAAGUAGGUACGACG | | [590-608] ORF |
| 115 | GAAUGAAACUCACCGUCCA | UGGACGGUGAGUUUCAUUC | | [1869-1887] 3′UTR |
| 116 | GUCUAUUGUUAAGCUCCAA | UUGGAGCUUAACAAUAGAC | | [2342-2360] 3′UTR |
| 117 | CAACCUCAACGAGGUAAUA | UAUUACCUCGUUGAGGUUG | Chimp | [329-347] ORF |
| 118 | UAGGCUUGGUAAUAGACUA | UAGUCUAUUACCAAGCCUA | | [1100-1118] 3′UTR |
| 119 | GUAUGUAAAAAGCUGGAUA | UAUCCAGCUUUUUACAUAC | Dog, Chimp, Ms | [552-570] ORF |
| 120 | GUUGCAACUGGCAGUUUGA | UCAAACUGCCAGUUGCAAC | Chimp | [207-225] ORF |
| 121 | CCUAGAGAAUGAAACUCAC | GUGAGUUUCAUUCUCUAGG | | [1863-1881] 3′UTR |
| 122 | GCCUGCUAAGUGAUUUUGA | UCAAAAUCACUUAGCAGGC | Chimp | [283-301] ORF |
| 123 | CUAUUAGCUCCACUUCACA | UGUGAAGUGGAGCUAAUAG | | [2114-2132] 3′UTR |
| 124 | AGUGAUUGAAGGGUCCUAA | UUAGGACCCUUCAAUCACU | | [767-785] ORF |
| 125 | GGGUAGUAGCUGUAUACUA | UAGUAUACAGCUACUACCC | | [1772-1790] 3′UTR |
| 126 | UGUUGUUUUGCAUGUCUAU | AUAGACAUGCAAAACAACA | | [2329-2347] 3′UTR |
| 127 | GUUCCUGACUCAAAUUUGA | UCAAAUUUGAGUCAGGAAC | | [1251-1269] 3′UTR |
| 128 | CAGUAACCACGGUGUUGUU | AACAACACCGUGGUUACUG | | [1440-1458] 3′UTR |
| 129 | AGAUUUUUUCCACCUUGGA | UCCAAGGUGGAAAAAAUCU | | [1907-1925] 3′UTR |
| 130 | CCCAGAGAAUUGCUCAAGA | UCUUGAGCAAUUCUCUGGG | Chimp, Ms | [457-475] ORF |
| 131 | CAGAUUUGCCUAUUUUGAU | AUCAAAAUAGGCAAAUCUG | | [1126-1144] 3′UTR |
| 132 | UGGAAGGCUGUUAAAUUAA | UUAAUUUAACAGCCUUCCA | | [2511-2529] 3′UTR |
| 133 | UAUAGUACAGCCUAGAGAA | UUCUCUAGGCUGUACUAUA | | [1853-1871] 3′UTR |
| 134 | GGUUGUGUUAUGCACGUGA | UCACGUGCAUAACACAACC | Ms | [516-534] ORF |
| 135 | GAUACCUGUCACUAGGGAA | UUCCCUAGUGACAGGUAUC | | [1924-1942] 3′UTR |
| 136 | CCUAUCAAAACUUCCAAAA | UUUUGGAAGUUUUGAUAGG | | [1219-1237] 3′UTR |
| 137 | GCGUAGGGACAGAUGUAUU | AAUACAUCUGUCCCUACGC | | [2145-2163] 3′UTR |
| 138 | GAUACUAUAAGUGACCUAA | UUAGGUCACUUAUAGUAUC | | [2204-2222] 3′UTR |
| 139 | CGAAGUCUGCAUUGGCUAU | AUAGCCAAUGCAGACUUCG | | [1822-1840] 3′UTR |
| 140 | GGAUAGGAUUGUGUGUGAU | AUCACACACAAUCCUAUCC | Chin, GP, Chimp, Rat | [566-584] ORF |
| 141 | GGCCUUUGGAGAAGUGAUU | AAUCACUUCUCCAAAGGCC | | [959-977] 3′UTR |
| 142 | AUAGGUAAGCAAAAGUAGA | UCUACUUUUGCUUACCUAU | | [1037-1055] 3′UTR |
| 143 | GGUAGGAUUAAGUAGGUGA | UCACCUACUUAAUCCUACC | | [1288-1306] 3′UTR |
| 144 | GAUUAAGUAGGUGAGUUUA | UAAACUCACCUACUUAAUC | | [1293-1311] 3′UTR |
| 145 | AGGAAGGUAGGAUUAAGUA | UACUUAAUCCUACCUUCCU | | [1283-1301] 3′UTR |
| 146 | GGUGUGAUCCUGUUACUGA | UCAGUAACAGGAUCACACC | | [2187-2205] 3′UTR |
| 147 | CAUGGACUAGCUUCAGGGA | UCCCUGAAGCUAGUCCAUG | Dog, Chimp | [640-658] ORF |
| 148 | GAAGGGUUUUUAGACAGGA | UCCUGUCUAAAAACCCUUC | | [1268-1286] 3′UTR |
| 149 | CUUUGGAGAAGUGAUUCAA | UUGAAUCACUUCUCCAAAG | | [962-980] 3′UTR |
| 150 | UGGAGAAGUGAUUCAAAAU | AUUUUGAAUCACUUCUCCA | | [965-983] 3′UTR |
| 151 | CAGUGAUUGAAGGGUCCUA | UAGGACCCUUCAAUCACUG | | [766-784] ORF |
| 152 | UGUACAGAAUUGAAUGGGA | UCCCAUUCAAUUCUGUACA | | [1014-1032] 3′UTR |
| 153 | UCAACGAGGUAAUAUUUGA | UCAAAUAUUACCUCGUUGA | Chimp | [334-352] ORF |
| 154 | CUCUGGGCUUUUCUGGGAA | UUCCCAGAAAAGCCCAGAG | | [1721-1739] 3′UTR |
| 155 | GGCUUGCGAGGUUGUGUUA | UAACACAACCUCGCAAGCC | Chimp | [507-525] ORF |
| 156 | CGGCAAUAAUGGAACUGCU | AGCAGUUCCAUUAUUGCCG | | [1353-1371] 3′UTR |
| 157 | CUUUACUCACUGAUUGGAA | UUCCAAUCAGUGAGUAAAG | | [744-762] ORF |
| 158 | GGACUUUUUCUUUAGUAGA | UCUACUAAAGAAAAAGUCC | | [656-674] ORF |
| 159 | CUCUGAUUCACUUAGUAAU | AUUACUAAGUGAAUCAGAG | | [1632-1650] 3′UTR |
| 160 | GUACAGAAUUGAAUGGGAU | AUCCCAUUCAAUUCUGUAC | | [1015-1033] 3′UTR |
| 161 | GGGAAUAAUAAAGGCCUUA | UAAGGCCUUUAUUAUUCCC | | [1938-1956] 3′UTR |
| 162 | UACCUGUGAGGAUAGGAAA | UUUCCUAUCCUCACAGGUA | | [1591-1609] 3′UTR |
| 163 | GGAUACCUGUCACUAGGGA | UCCCUAGUGACAGGUAUCC | | [1923-1941] 3′UTR |
| 164 | CUAGCUUCAGGGACUUUUU | AAAAAGUCCCUGAAGCUAG | Chimp | [646-664] ORF |
| 165 | AAAGAUACUACAAAGCCAA | UUGGCUUUGUAGUAUCUUU | | [2280-2298] 3′UTR |
| 166 | UGUGGUGCCAUUUCAGUAA | UUACUGAAAUGGCACCACA | | [1427-1445] 3′UTR |
| 167 | AUAGAAUUGGGCCAAGAUA | UAUCUUGGCCCAAUUCUAU | | [2304-2322] 3′UTR |
| 168 | GUUUCAGGUAGGCUUGGUA | UACCAAGCCUACCUGAAAC | | [1092-1110] 3′UTR |
| 169 | GGUCGUGGAUAAGGAGCUU | AAGCUCCUUAUCCACGACC | | [2075-2093] 3′UTR |
| 170 | AAUGGUGAUGGCUUAUGGA | UCCAUAAGCCAUCACCAUU | | [2496-2514] 3′UTR |
| 171 | GCUUGUGGUGCCAUUUCAG | CUGAAAUGGCACCACAAGC | | [1424-1442] 3′UTR |
| 172 | UGUGCUUAAUCUCAGAUGA | UCAUCUGAGAUUAAGCACA | | [1673-1691] 3′UTR |
| 173 | UAGGUAAGCAAAAGUAGAA | UUCUACUUUUGCUUACCUA | | [1038-1056] 3′UTR |
| 174 | UGAUUUUCUGGCCUUUGGA | UCCAAAGGCCAGAAAAUCA | | [950-968] 3′UTR |
| 175 | GCUUCUUGGGCAUCGAUGU | ACAUCGAUGCCCAAGAAGC | | [2415-2433] 3′UTR |
| 176 | CCGUCCAGAUAACCAUGCA | UGCAUGGUUAUCUGGACGG | | [1881-1899] 3′UTR |
| 177 | AACCAUGCAUGCACCCAGA | UCUGGGUGCAUGCAUGGUU | | [1891-1909] 3′UTR |
| 178 | CAGGAAGGUAGGAUUAAGU | ACUUAAUCCUACCUUCCUG | | [1282-1300] 3′UTR |
| 179 | GAAUUGGGCCAAGAUAAAU | AUUUAUCUUGGCCCAAUUC | | [2307-2325] 3′UTR |
| 180 | GUGAGGAUAGGAAAUUAGU | ACUAAUUUCCUAUCCUCAC | | [1596-1614] 3′UTR |
| 181 | GAUUUUUUCCACCUUGGAU | AUCCAAGGUGGAAAAAAUC | | [1908-1926] 3′UTR |
| 182 | GCAUGCACCCAGAUUUUUU | AAAAAAUCUGGGUGCAUGC | | [1897-1915] 3′UTR |
| 183 | CCUGCUAAGUGAUUUUGAC | GUCAAAAUCACUUAGCAGG | Chimp | [284-302] ORF |
| 184 | GGGAUUAUGUUGUUCCUGA | UCAGGAACAACAUAAUCCC | Chimp | [307-325] ORF |
| 185 | UGCCUGUUAUGCUUACAAA | UUUGUAAGCAUAACAGGCA | | [2478-2496] 3′UTR |
| 186 | CCACCUUGGAUACCUGUCA | UGACAGGUAUCCAAGGUGG | | [1916-1934] 3′UTR |
| 187 | UGGCCUUUGGAGAAGUGAU | AUCACUUCUCCAAAGGCCA | | [958-976] 3′UTR |
| 188 | CUGCAUAGAUCCCAUUUUU | AAAAAUGGGAUCUAUGCAG | | [996-1014] 3′UTR |
| 189 | CCAACCUCAACGAGGUAAU | AUUACCUCGUUGAGGUUGG | Chimp | [328-346] ORF |
| 190 | AGAAACUGACCCAGAGAAU | AUUCUCUGGGUCAGUUUCU | Chin, GP, Chimp, Rat, Ms | [448-466] ORF |
| 191 | UGGUGACUUCCUCACUCUA | UAGAGUGAGGAAGUCACCA | | [1383-1401] 3′UTR |
| 192 | AGGGAAUAAUAAAGGCCUU | AAGGCCUUUAUUAUUCCCU | | [1937-1955] 3′UTR |
| 193 | CCUGUUAUGCUUACAAAAU | AUUUUGUAAGCAUAACAGG | | [2480-2498] 3′UTR |
| 194 | AAAGUAGAAGCCCAUUUGA | UCAAAUGGGCUUCUACUUU | | [1048-1066] 3′UTR |
| 195 | GAUUUUGACUACUGGGAUU | AAUCCCAGUAGUCAAAAUC | Dog, Chimp | [294-312] ORF |
| 196 | GGCUUAUGGAAGGCUGUUA | UAACAGCCUUCCAUAAGCC | | [2505-2523] 3′UTR |
| 197 | UGUUGUCCUUUUUCCACUA | UAGUGGAAAAAGGACAACA | | [2439-2457] 3′UTR |
| 198 | GGCGUAGGGACAGAUGUAU | AUACAUCUGUCCCUACGCC | | [2144-2162] 3′UTR |
| 199 | AGUGUAGAUUUUCUGCAUA | UAUGCAGAAAAUCUACACU | | [984-1002] 3′UTR |
| 200 | CCUUGGAUACCUGUCACUA | UAGUGACAGGUAUCCAAGG | | [1919-1937] 3′UTR |
| 201 | CCAGAUUUUUUCCACCUUG | CAAGGUGGAAAAAAUCUGG | | [1905-1923] 3′UTR |
| 202 | UAGGUAAGAGUAAAUGAGA | UCUCAUUUACUCUUACCUA | | [1327-1345] 3′UTR |
| 203 | ACCUGCCCUAAAUAAGAAA | UUUCUUAUUUAGGGCAGGU | | [870-888] 3′UTR |
| 204 | UGAGGAUAGGAAAUUAGUU | AACUAAUUUCCUAUCCUCA | | [1597-1615] 3′UTR |
| 205 | GGCUUUUUUUUCUCUAAGU | ACUUAGAGAAAAAAAAGCC | | [1153-1171] 3′UTR |
| 206 | AAGGGUCCUAAAAAGGGAA | UUCCCUUUUUAGGACCCUU | | [775-793] ORF + 3′UTR |
| 207 | UAUGCACGUGAACUUGGAA | UUCCAAGUUCACGUGCAUA | Dog, Chin, GP, Rat | [524-542] ORF |
| 208 | GGCUUGGUAAUAGACUAUA | UAUAGUCUAUUACCAAGCC | | [1102-1120] 3′UTR |
| 209 | CGUUGACCAUGGUUGCAAC | GUUGCAACCAUGGUCAACG | Chimp, Rat, Ms | [196-214] 5′UTR + ORF |
| 210 | UGUCUAUUGUUAAGCUCCA | UGGAGCUUAACAAUAGACA | | [2341-2359] 3′UTR |
| 211 | GCAUAGAUCCCAUUUUUGU | ACAAAAAUGGGAUCUAUGC | | [998-1016] 3′UTR |
| 212 | CAAUUUACGAAGUCUGCAU | AUGCAGACUUCGUAAAUUG | | [1815-1833] 3′UTR |
| 213 | GGAAUAGGUAAGCAAAAGU | ACUUUUGCUUACCUAUUCC | | [1034-1052] 3′UTR |
| 214 | UCAGCUAAAGUCAUUUGUA | UACAAAUGACUUUAGCUGA | | [842-860] 3′UTR |
| 215 | GCUGGAUAGGAUUGUGUGU | ACACACAAUCCUAUCCAGC | Chin, GP, Chimp, Rat | [563-581] ORF |
| 216 | GGAAGGUAGGAUUAAGUAG | CUACUUAAUCCUACCUUCC | | [1284-1302] 3′UTR |
| 217 | GUACAGCCUAGAGAAUGAA | UUCAUUCUCUAGGCUGUAC | | [1857-1875] 3′UTR |
| 218 | GAUUCUAGCGUCGUACCUA | UAGGUACGACGCUAGAAUC | | [582-600] ORF |
| 219 | GAUCUAGUCCCUCUCUGAU | AUCAGAGAGGGACUAGAUC | | [1620-1638] 3′UTR |
| 220 | GACUCAAAUUUGAAGGGUU | AACCCUUCAAAUUUGAGUC | | [1257-1275] 3′UTR |
| 221 | UCCACUCAACAAUGUUCAA | UUGAACAUUGUUGAGUGGA | | [2027-2045] 3′UTR |
| 222 | UGUAGAUUUUCUGCAUAGA | UCUAUGCAGAAAAUCUACA | | [986-1004] 3′UTR |
| 223 | UCGUGGAUAAGGAGCUUAU | AUAAGCUCCUUAUCCACGA | | [2077-2095] 3′UTR |
| 224 | UGGAGAUAUGGUUUAUAGU | ACUAUAAACCAUAUCUCCA | | [1840-1858] 3′UTR |
| 225 | GUAUACUACCACUUUGAAU | AUUCAAAGUGGUAGUAUAC | | [1783-1801] 3′UTR |
| 226 | CCGUUGACCAUGGUUGCAA | UUGCAACCAUGGUCAACGG | Chimp, Rat, Ms | [195-213] 5′UTR + ORF |
| 227 | GGGAUGGAAUAGGUAAGCA | UGCUUACCUAUUCCAUCCC | | [1029-1047] 3′UTR |
| 228 | GAAUUAUUGAAACGGGUCA | UGACCCGUUUCAAUAAUUC | | [1798-1816] 3′UTR |
| 229 | CUAUGGAGAUAUGGUUUAU | AUAAACCAUAUCUCCAUAG | | [1837-1855] 3′UTR |
| 230 | CCUUUGGAGAAGUGAUUCA | UGAAUCACUUCUCCAAAGG | | [961-979] 3′UTR |
| 231 | AGCCCAUUUGAGUUUUACA | UGUAAAACUCAAAUGGGCU | | [1056-1074] 3′UTR |
| 232 | AGGAUUGUGUGUGAUUCUA | UAGAAUCACACACAAUCCU | Chimp | [570-588] ORF |
| 233 | UGCUUGGAAAGAUACUACA | UGUAGUAUCUUUCCAAGCA | | [2273-2291] 3′UTR |
| 234 | ACCAGUUCCUGACUCAAAU | AUUUGAGUCAGGAACUGGU | | [1247-1265] 3′UTR |
| 235 | GGCUAUGGAGAUAUGGUUU | AAACCAUAUCUCCAUAGCC | | [1835-1853] 3′UTR |
| 236 | CUUUUUCCACUAACAGUUA | UAACUGUUAGUGGAAAAAG | | [2446-2464] 3′UTR |
| 237 | CCCAGAUUUUUUCCACCUU | AAGGUGGAAAAAAUCUGGG | | [1904-1922] 3′UTR |
| 238 | GGUCCUAAAAAGGGAAAAU | AUUUUCCCUUUUUAGGACC | | [778-796] ORF + 3′UTR |
| 239 | GCUUCAGGGACUUUUUCUU | AAGAAAAAGUCCCUGAAGC | Chimp | [649-667] ORF |
| 240 | UGUUUUAAAGAGGCAACAA | UUGUUGCCUCUUUAAAACA | | [1403-1421] 3′UTR |
| 241 | GGAAUAAUAAAGGCCUUAU | AUAAGGCCUUUAUUAUUCC | | [1939-1957] 3′UTR |
| 242 | GCAUGUCUAUUGUUAAGCU | AGCUUAACAAUAGACAUGC | | [2338-2356] 3′UTR |
| 243 | AGGUCCUUGUCCCUGAGAA | UUCUCAGGGACAAGGACCU | Chimp | [433-451] ORF |
| 244 | UGAUGAAUACCUGUGAGGA | UCCUCACAGGUAUUCAUCA | | [1584-1602] 3′UTR |
| 245 | CUGUAUACUACCACUUUGA | UCAAAGUGGUAGUAUACAG | | [1781-1799] 3′UTR |
| 246 | GUAGAUUUUCUGCAUAGAU | AUCUAUGCAGAAAAUCUAC | | [987-1005] 3′UTR |
| 247 | UUAUGCACGUGAACUUGGA | UCCAAGUUCACGUGCAUAA | Dog, Chin, GP, Rat, Ms | [523-541] ORF |
| 248 | GAAACUGACCCAGAGAAUU | AAUUCUCUGGGUCAGUUUC | Chin, GP, Chimp, Rat, Ms | [449-467] ORF |
| 249 | CCAGUUCCUGACUCAAAUU | AAUUUGAGUCAGGAACUGG | | [1248-1266] 3′UTR |
| 250 | GAAACAGAGCCGUUGACCA | UGGUCAACGGCUCUGUUUC | Dog, Chimp, Rat, Ms | [186-204] 5′UTR |
| 251 | GAGAACUGUCUGUCCAAAU | AUUUGGACAGACAGUUCUC | Dog, Chimp | [387-405] ORF |
| 252 | UGUCACUAGGGAAUAAUAA | UUAUUAUUCCCUAGUGACA | | [1930-1948] 3′UTR |
| 253 | CAUUGAGUGAAUGAUGAAU | AUUCAUCAUUCACUCAAUG | | [1573-1591] 3′UTR |
| 254 | UACAGCCUAGAGAAUGAAA | UUUCAUUCUCUAGGCUGUA | | [1858-1876] 3′UTR |
| 255 | GGAGAACUCUGAUCCUCAG | CUGAGGAUCAGAGUUCUCC | | [697-715] ORF |
| 256 | ACGAGGUAAUAUUUGAGGA | UCCUCAAAUAUUACCUCGU | Chimp | [337-355] ORF |
| 257 | CAGGGACUUUUUCUUUAGU | ACUAAAGAAAAAGUCCCUG | | [653-671] ORF |
| 258 | AGUUGAUUACUCUUCCAUU | AAUGGAAGAGUAAUCAACU | | [1558-1576] 3′UTR |
| 259 | GGAACAACAGUGAUUGAAG | CUUCAAUCACUGUUGUUCC | | [759-777] ORF |
| 260 | AAGGAAACAGAGCCGUUGA | UCAACGGCUCUGUUUCCUU | Chimp | [183-201] 5′UTR |
| 261 | CAAAGCCAAUCUUUAUAGA | UCUAUAAAGAUUGGCUUUG | | [2290-2308] 3′UTR |
| 262 | AAACGGGUCAAUUUACGAA | UUCGUAAAUUGACCCGUUU | | [1807-1825] 3′UTR |
| 263 | AAGGCUUCUUGGGCAUCGA | UCGAUGCCCAAGAAGCCUU | | [2412-2430] 3′UTR |
| 264 | CCUGAGAAACUGACCCAGA | UCUGGGUCAGUUUCUCAGG | Dog, Chin, GP, Chimp, | [444-462] ORF |
| | | | Rat, Ms | |
| 265 | CUGCAUUGGCUAUGGAGAU | AUCUCCAUAGCCAAUGCAG | | [1828-1846] 3′UTR |
| 266 | GAUUGUGUGUGAUUCUAGC | GCUAGAAUCACACACAAUC | | [572-590] ORF |
| 267 | GCUAGUCAGCUAAAGUCAU | AUGACUUUAGCUGACUAGC | | [837-855] 3′UTR |
| 268 | UAUUCAUCCUGGUGUUACU | AGUAACACCAGGAUGAAUA | | [2160-2178] 3′UTR |
| 269 | GGGUAGUAAAACUAUUCAG | CUGAAUAGUUUUACUACCC | | [819-837] 3′UTR |
| 270 | ACCACGGUGUUGUUUUAGA | UCUAAAACAACACCGUGGU | | [1445-1463] 3′UTR |
| 271 | CAGUUAUCUUUGACUCUCU | AGAGAGUCAAAGAUAACUG | | [2459-2477] 3′UTR |
| 272 | CACAAUUUGGUUUCAGGUA | UACCUGAAACCAAAUUGUG | | [1083-1101] 3′UTR |
| 273 | UGAUUGGGUAGUAAAACUA | UAGUUUUACUACCCAAUCA | | [814-832] 3′UTR |
| 274 | CUUCUUGGGCAUCGAUGUA | UACAUCGAUGCCCAAGAAG | | [2416-2434] 3′UTR |
| 275 | GCUUUUCUGGGAAUUGAAG | CUUCAAUUCCCAGAAAAGC | | [1727-1745] 3′UTR |
| 276 | GGAUUGUGUGUGAUUCUAG | CUAGAAUCACACACAAUCC | Chimp | [571-589] ORF |
| 277 | AGUCUGCAUUGGCUAUGGA | UCCAUAGCCAAUGCAGACU | | [1825-1843] 3′UTR |
| 278 | ACUACAAAGCCAAUCUUUA | UAAAGAUUGGCUUUGUAGU | | [2286-2304] 3′UTR |
| 279 | UAGUGUAGAUUUUCUGCAU | AUGCAGAAAAUCUACACUA | | [983-1001] 3′UTR |
| 280 | GCAAAAGUAGAAGCCCAUU | AAUGGGCUUCUACUUUUGC | | [1045-1063] 3′UTR |
| 281 | GGGUCAAUUUACGAAGUCU | AGACUUCGUAAAUUGACCC | | [1811-1829] 3′UTR |
| 282 | AGGCUUCUUGGGCAUCGAU | AUCGAUGCCCAAGAAGCCU | | [2413-2431] 3′UTR |
| 283 | UGAUUGGAACAACAGUGAU | AUCACUGUUGUUCCAAUCA | | [754-772] ORF |
| 284 | AAUUCAGCAAGGCUUUCAU | AUGAAAGCCUUGCUGAAUU | | [2044-2062] 3′UTR |
| 285 | AAUGAUGAAUACCUGUGAG | CUCACAGGUAUUCAUCAUU | | [1582-1600] 3′UTR |
| 286 | AUACCUGUGAGGAUAGGAA | UUCCUAUCCUCACAGGUAU | | [1590-1608] 3′UTR |
| 287 | UUCAUGAUUGGGUAGUAAA | UUUACUACCCAAUCAUGAA | | [810-828] 3′UTR |
| 288 | CUACAAAGCCAAUCUUUAU | AUAAAGAUUGGCUUUGUAG | | [2287-2305] 3′UTR |
| 289 | GAGCCUGCUAAGUGAUUUU | AAAAUCACUUAGCAGGCUC | Chimp | [281-299] ORF |
| 290 | AACCCUAGGUAAGAGUAAA | UUUACUCUUACCUAGGGUU | | [1322-1340] 3′UTR |
| 291 | UAACCCUAGGUAAGAGUAA | UUACUCUUACCUAGGGUUA | | [1321-1339] 3′UTR |
| 292 | CAAAAUGGUGAUGGCUUAU | AUAAGCCAUCACCAUUUUG | | [2493-2511] 3′UTR |
| 293 | UUAGCCAGUGUUCUAACAA | UUGUUAGAACACUGGCUAA | | [2239-2257] 3′UTR |
| 294 | AACUGUUGUCCUUUUUCCA | UGGAAAAAGGACAACAGUU | | [2436-2454] 3′UTR |
| 295 | GCAUUUCAGAAUUGCUGGA | UCCAGCAAUUCUGAAAUGC | Chimp | [244-262] ORF |
| 296 | GUACCUACUUUUGAGCUUA | UAAGCUCAAAAGUAGGUAC | | [594-612] ORF |
| 297 | CUGUCUGUCCAAAUCAAAG | CUUUGAUUUGGACAGACAG | Dog, Chimp | [392-410] ORF |
| 298 | GUCUUAUUCCAACUAAGUA | UACUUAGUUGGAAUAAGAC | | [1963-1981] 3′UTR |
| 299 | UUGUGUUUAAGCAGGAGAA | UUCUCCUGCUUAAACACAA | Dog, Chimp | [616-634] ORF |
| 300 | UGCCAGAAUUUGGUUAAAA | UUUUAACCAAAUUCUGGCA | GP, Chimp, Rat, Ms | [363-381] ORF |
| 301 | CUAAUGUUUUAAAGAGGCA | UGCCUCUUUAAAACAUUAG | | [1399-1417] 3′UTR |
| 302 | CUAAGUUUUCAGAGGAUUU | AAAUCCUCUGAAAACUUAG | | [1166-1184] 3′UTR |
| 303 | GGUUUAUAGUACAGCCUAG | CUAGGCUGUACUAUAAACC | | [1849-1867] 3′UTR |
| 304 | ACAGGAAGGUAGGAUUAAG | CUUAAUCCUACCUUCCUGU | | [1281-1299] 3′UTR |
| 305 | UCCUCUGGUUUCAGGAGAA | UUCUCCUGAAACCAGAGGA | | [684-702] ORF |
| 306 | UGUUGUUUUAGAUGCCUUU | AAAGGCAUCUAAAACAACA | | [1452-1470] 3′UTR |
| 307 | UCUCUGAUUCACUUAGUAA | UUACUAAGUGAAUCAGAGA | | [1631-1649] 3′UTR |
| 308 | UGAUUUUGACUACUGGGAU | AUCCCAGUAGUCAAAAUCA | Dog, Chimp | [293-311] ORF |
| 309 | AGAGAGCCUGCUAAGUGAU | AUCACUUAGCAGGCUCUCU | Chimp | [278-296] ORF |
| 310 | GGUGAUGGCUUAUGGAAGG | CCUUCCAUAAGCCAUCACC | | [2499-2517] 3′UTR |
| 311 | UGUCAAGGGUAGUAGCUGU | ACAGCUACUACCCUUGACA | | [1766-1784] 3′UTR |
| 312 | CGCUUCUCCUCUGGUUUCA | UGAAACCAGAGGAGAAGCG | | [678-696] ORF |
| 313 | AUGUUGUUUUGCAUGUCUA | UAGACAUGCAAAACAACAU | | [2328-2346] 3′UTR |
| 314 | CUAGCGUCGUACCUACUUU | AAAGUAGGUACGACGCUAG | | [586-604] ORF |
| 315 | CCAGAUAACCAUGCAUGCA | UGCAUGCAUGGUUAUCUGG | | [1885-1903] 3′UTR |
| 316 | CUUCCAAAAGCCCACACCA | UGGUGUGGGCUUUUGGAAG | | [1229-1247] 3′UTR |
| 317 | AGUUAUCUUUGACUCUCUU | AAGAGAGUCAAAGAUAACU | | [2460-2478] 3′UTR |
| 318 | CUUAAGUGUUGAAUACUGU | ACAGUAUUCAACACUUAAG | | [1492-1510] 3′UTR |
| 319 | CAUAGCAACUGCAGCUAAC | GUUAGCUGCAGUUGCUAUG | | [927-945] 3′UTR |
| 320 | CCGGCCAGCAUUUCAGAAU | AUUCUGAAAUGCUGGCCGG | Chimp | [237-255] ORF |
| 321 | GGCCAAGAUAAAUCAAUGU | ACAUUGAUUUAUCUUGGCC | | [2313-2331] 3′UTR |
| 322 | AUAUUACGGCAAUAAUGGA | UCCAUUAUUGCCGUAAUAU | | [1347-1365] 3′UTR |
| 323 | ACUUCCUCACUCUAAUGUU | AACAUUAGAGUGAGGAAGU | | [1388-1406] 3′UTR |
| 324 | UAAAAAGCUGGAUAGGAUU | AAUCCUAUCCAGCUUUUUA | Chin, GP, Chimp, Rat | [557-575] ORF |
| 325 | AUGUUGUUCCUGAACCCAA | UUGGGUUCAGGAACAACAU | Chimp | [313-331] ORF |
| 326 | GGUUUCAGGAGAACUCUGA | UCAGAGUUCUCCUGAAACC | | [690-708] ORF |
| 327 | CAUGGUUGCAACUGGCAGU | ACUGCCAGUUGCAACCAUG | Chimp | [203-221] 5′UTR + ORF |
| 328 | UUUCAGGUAGGCUUGGUAA | UUACCAAGCCUACCUGAAA | | [1093-1111] 3′UTR |
| 329 | UGUGAUCCUGUUACUGAUA | UAUCAGUAACAGGAUCACA | | [2189-2207] 3′UTR |
| 330 | UUUCAUGAUUGGGUAGUAA | UUACUACCCAAUCAUGAAA | | [809-827] 3′UTR |
| 331 | GUUUUUAGACAGGAAGGUA | UACCUUCCUGUCUAAAAAC | | [1273-1291] 3′UTR |
| 332 | AGGUUUCCUGCCCUAGCUA | UAGCUAGGGCAGGAAACCU | | [2098-2116] 3′UTR |
| 333 | CAACAAUGUUCAAUUCAGC | GCUGAAUUGAACAUUGUUG | | [2033-2051] 3′UTR |
| 334 | CCUCUUUUCAGUAUUACAU | AUGUAAUACUGAAAAGAGG | | [1655-1673] 3′UTR |
| 335 | GUCAAGGGUAGUAGCUGUA | UACAGCUACUACCCUUGAC | | [1767-1785] 3′UTR |
| 336 | AGUGUUGAAUACUGUCUUU | AAAGACAGUAUUCAACACU | | [1496-1514] 3′UTR |
| 337 | GAACAACAGUGAUUGAAGG | CCUUCAAUCACUGUUGUUC | | [760-778] ORF |
| 338 | UCCUCUUUUCAGUAUUACA | UGUAAUACUGAAAAGAGGA | | [1654-1672] 3′UTR |
| 339 | AGGAAUCAACUUGCCAGAA | UUCUGGCAAGUUGAUUCCU | Chimp | [352-370] ORF |
| 340 | CGUCCAGAUAACCAUGCAU | AUGCAUGGUUAUCUGGACG | | [1882-1900] 3′UTR |
| 341 | CCUUUUUCCACUAACAGUU | AACUGUUAGUGGAAAAAGG | | [2445-2463] 3′UTR |
| 342 | CAGAAUUGAAUGGGAUGGA | UCCAUCCCAUUCAAUUCUG | | [1018-1036] 3′UTR |
| 343 | UUUUCUGGCCUUUGGAGAA | UUCUCCAAAGGCCAGAAAA | | [953-971] 3′UTR |
| 344 | CCUCUCUGAUUCACUUAGU | ACUAAGUGAAUCAGAGAGG | | [1629-1647] 3′UTR |
| 345 | GUCCCUCUCUGAUUCACUU | AAGUGAAUCAGAGAGGGAC | | [1626-1644] 3′UTR |
| 346 | AGGGUCCUAAAAAGGGAAA | UUUCCCUUUUUAGGACCCU | | [776-794] ORF + 3′UTR |
| 347 | UAUAGAAUUGGGCCAAGAU | AUCUUGGCCCAAUUCUAUA | | [2303-2321] 3′UTR |
| 348 | GUUUCAGGAGAACUCUGAU | AUCAGAGUUCUCCUGAAAC | | [691-709] ORF |
| 349 | GCUAUUAGCUCCACUUCAC | GUGAAGUGGAGCUAAUAGC | | [2113-2131] 3′UTR |
| 350 | UGGGCCAAGAUAAAUCAAU | AUUGAUUUAUCUUGGCCCA | | [2311-2329] 3′UTR |
| 351 | ACUCAAAUUUGAAGGGUUU | AAACCCUUCAAAUUUGAGU | | [1258-1276] 3′UTR |
| 352 | CUAACAGGCUGAUUUUCUG | CAGAAAAUCAGCCUGUUAG | | [941-959] 3′UTR |
| 353 | CAAUGUUCAAUUCAGCAAG | CUUGCUGAAUUGAACAUUG | | [2036-2054] 3′UTR |
| 354 | UGGUGUUACUGAAAAACAG | CUGUUUUUCAGUAACACCA | | [2169-2187] 3′UTR |
| 355 | GUUCCUGAACCCAACCUCA | UGAGGUUGGGUUCAGGAAC | Chimp | [318-336] ORF |
| 356 | AGGAGAACUCUGAUCCUCA | UGAGGAUCAGAGUUCUCCU | | [696-714] ORF |
| 357 | UUGCCAGAAUUUGGUUAAA | UUUAACCAAAUUCUGGCAA | Chimp | [362-380] ORF |
| 358 | UGUAUACUACCACUUUGAA | UUCAAAGUGGUAGUAUACA | | [1782-1800] 3′UTR |
| 359 | AUCCUGGUGUUACUGAAAA | UUUUCAGUAACACCAGGAU | | [2165-2183] 3′UTR |
| 360 | CAGCUAACAGGCUGAUUUU | AAAAUCAGCCUGUUAGCUG | | [938-956] 3′UTR |
| 361 | CCCAAAUGUAGUCUCUUUU | AAAAGAGACUACAUUUGGG | | [890-908] 3′UTR |
| 362 | CCAUGCAUGCACCCAGAUU | AAUCUGGGUGCAUGCAUGG | | [1893-1911] 3′UTR |
| 363 | AUGGUGAUGGCUUAUGGAA | UUCCAUAAGCCAUCACCAU | | [2497-2515] 3′UTR |
| 364 | GAACCAUUUCACCAUGGCA | UGCCAUGGUGAAAUGGUUC | | [1690-1708] 3′UTR |
| 365 | ACUAAACUUGGUUGCUCAA | UUGAGCAACCAAGUUUAGU | Chimp | [414-432] ORF |
| 366 | UUUUCUGCAUAGAUCCCAU | AUGGGAUCUAUGCAGAAAA | | [992-1010] 3′UTR |
| 367 | ACGAAGUCUGCAUUGGCUA | UAGCCAAUGCAGACUUCGU | | [1821-1839] 3′UTR |
| 368 | GAUCAUUAUCUCUUUCCUU | AAGGAAAGAGAUAAUGAUC | | [1982-2000] 3′UTR |
| 369 | UGGCUAUGGAGAUAUGGUU | AACCAUAUCUCCAUAGCCA | | [1834-1852] 3′UTR |
| 370 | GGUAGUAGCUGUAUACUAC | GUAGUAUACAGCUACUACC | | [1773-1791] 3′UTR |
| 371 | UUGGGCCAAGAUAAAUCAA | UUGAUUUAUCUUGGCCCAA | | [2310-2328] 3′UTR |
| 372 | CCAAUUGUCAAGGGUAGUA | UACUACCCUUGACAAUUGG | | [1761-1779] 3′UTR |
| 373 | CUUAGUAAUCUAUCCUCUU | AAGAGGAUAGAUUACUAAG | | [1642-1660] 3′UTR |
| 374 | UGGUGAUGGCUUAUGGAAG | CUUCCAUAAGCCAUCACCA | | [2498-2516] 3′UTR |
| 375 | CUGGAGUUGUCACCACUGA | UCAGUGGUGACAACUCCAG | | [2387-2405] 3′UTR |
| 376 | CACUGAUUGGAACAACAGU | ACUGUUGUUCCAAUCAGUG | | [751-769] ORF |
| 377 | CAGUUUGAGCAGCAAGAAC | GUUCUUGCUGCUCAAACUG | Chimp | [218-236] ORF |
| 378 | UAGGGACAGAUGUAUUCAU | AUGAAUACAUCUGUCCCUA | | [2148-2166] 3′UTR |
| 379 | CAAUCUUUAUAGAAUUGGG | CCCAAUUCUAUAAAGAUUG | | [2296-2314] 3′UTR |
| 380 | UGUCCUUUUUCCACUAACA | UGUUAGUGGAAAAAGGACA | | [2442-2460] 3′UTR |
| 381 | GUCCUAAAAAGGGAAAAUA | UAUUUUCCCUUUUUAGGAC | | [779-797] ORF + 3′UTR |
| 382 | GGUUGCAACUGGCAGUUUG | CAAACUGCCAGUUGCAACC | Chimp | [206-224] ORF |
| 383 | AGCCUAUCAAAACUUCCAA | UUGGAAGUUUUGAUAGGCU | | [1217-1235] 3′UTR |
| 384 | CUAAACUCUUCAAAUGCUU | AAGCAUUUGAAGAGUUUAG | | [2259-2277] 3′UTR |
| 385 | CUUGGAUACCUGUCACUAG | CUAGUGACAGGUAUCCAAG | | [1920-1938] 3′UTR |
| 386 | CAACGAGGUAAUAUUUGAG | CUCAAAUAUUACCUCGUUG | Chimp | [335-353] ORF |
| 387 | GAGGUUGUGUUAUGCACGU | ACGUGCAUAACACAACCUC | | [514-532] ORF |
| 388 | CUUGCCAGAAUUUGGUUAA | UUAACCAAAUUCUGGCAAG | Chimp | [361-379] ORF |
| 389 | AAAAGCUUGUGGUGCCAUU | AAUGGCACCACAAGCUUUU | | [1420-1438] 3′UTR |
| 390 | GCAAGGCUUUCAUAUCCUU | AAGGAUAUGAAAGCCUUGC | | [2050-2068] 3′UTR |
| 391 | ACCUGUCACUAGGGAAUAA | UUAUUCCCUAGUGACAGGU | | [1927-1945] 3′UTR |
| 392 | AGCUUGUGGUGCCAUUUCA | UGAAAUGGCACCACAAGCU | | [1423-1441] 3′UTR |
| 393 | GGGACUUUUUCUUUAGUAG | CUACUAAAGAAAAAGUCCC | | [655-673] ORF |
| 394 | CUAGGUAAGAGUAAAUGAG | CUCAUUUACUCUUACCUAG | | [1326-1344] 3′UTR |
| 395 | CGUACCUACUUUUGAGCUU | AAGCUCAAAAGUAGGUACG | | [593-611] ORF |
| 396 | AAGAUACUACAAAGCCAAU | AUUGGCUUUGUAGUAUCUU | | [2281-2299] 3′UTR |
| 397 | CUCAGGAUUUCGACUUGUU | AACAAGUCGAAAUCCUGAG | | [716-734] ORF |
| 398 | CUUUAUAGAAUUGGGCCAA | UUGGCCCAAUUCUAUAAAG | | [2300-2318] 3′UTR |
| 399 | CCCAUUUUUGUACAGAAUU | AAUUCUGUACAAAAAUGGG | | [1006-1024] 3′UTR |
| 400 | UUGUGGUGCCAUUUCAGUA | UACUGAAAUGGCACCACAA | | [1426-1444] 3′UTR |
| 401 | GUGUGUAGUUGAUUACUCU | AGAGUAAUCAACUACACAC | | [1552-1570] 3′UTR |
| 402 | GUUUAUAGUACAGCCUAGA | UCUAGGCUGUACUAUAAAC | | [1850-1868] 3′UTR |
| 403 | AUGAGAAAUAUUACGGCAA | UUGCCGUAAUAUUUCUCAU | | [1340-1358] 3′UTR |
| 404 | CACCCAGAUUUUUUCCACC | GGUGGAAAAAAUCUGGGUG | | [1902-1920] 3′UTR |
| 405 | AUCCCAUUUUUGUACAGAA | UUCUGUACAAAAAUGGGAU | | [1004-1022] 3′UTR |
| 406 | CAGAAUUGCUGGACUGUGG | CCACAGUCCAGCAAUUCUG | Chimp | [250-268] ORF |
| 407 | UGACUACUGGGAUUAUGUU | AACAUAAUCCCAGUAGUCA | Chimp | [299-317] ORF |
| 408 | GAUCCUGUUACUGAUACUA | UAGUAUCAGUAACAGGAUC | | [2192-2210] 3′UTR |
| 409 | UCCAAAUCAAAGCAAACUA | UAGUUUGCUUUGAUUUGGA | Chimp | [399-417] ORF |
| 410 | UCUGGGCUUUUCUGGGAAU | AUUCCCAGAAAAGCCCAGA | | [1722-1740] 3′UTR |
| 411 | CCAUUUUUGUACAGAAUUG | CAAUUCUGUACAAAAAUGG | | [1007-1025] 3′UTR |
| 412 | CUGGCCUUUGGAGAAGUGA | UCACUUCUCCAAAGGCCAG | | [957-975] 3′UTR |
| 413 | UAGGAAAUUAGUUCUGAGA | UCUCAGAACUAAUUUCCUA | | [1603-1621] 3′UTR |
| 414 | CUUAAUCUCAGAUGAACCA | UGGUUCAUCUGAGAUUAAG | | [1677-1695] 3′UTR |
| 415 | AGGAAAUUAGUUCUGAGAU | AUCUCAGAACUAAUUUCCU | | [1604-1622] 3′UTR |
| 416 | AGGCUUGGUAAUAGACUAU | AUAGUCUAUUACCAAGCCU | | [1101-1119] 3′UTR |
| 417 | GAAUUUGGUUAAAAUGCUG | CAGCAUUUUAACCAAAUUC | Chimp | [368-386] ORF |
| 418 | UAGACAGGAAGGUAGGAUU | AAUCCUACCUUCCUGUCUA | | [1278-1296] 3′UTR |
| 419 | UUGAAGUAUCUCUCCUUAA | UUAAGGAGAGAUACUUCAA | | [1740-1758] 3′UTR |
| 420 | CUUUGACUCUCUUGCCUGU | ACAGGCAAGAGAGUCAAAG | | [2466-2484] 3′UTR |
| 421 | UGUGGCUAUCACCCAGAGA | UCUCUGGGUGAUAGCCACA | Chimp | [264-282] ORF |
| 422 | AGGCCUUAUUUUUUGUCUU | AAGACAAAAAAUAAGGCCU | | [1949-1967] 3′UTR |
| 423 | CAGUGUUAUCUCAUCUCUG | CAGAGAUGAGAUAACACUG | | [1707-1725] 3′UTR |
| 424 | UGAGAAACUGACCCAGAGA | UCUCUGGGUCAGUUUCUCA | Chin, GP, Chimp, Rat, Ms | [446-464] ORF |
| 425 | UGUUGUUCCUGAACCCAAC | GUUGGGUUCAGGAACAACA | Chimp | [314-332] ORF |
| 426 | GUUGUCCUUUUUCCACUAA | UUAGUGGAAAAAGGACAAC | | [2440-2458] 3′UTR |
| 427 | GGCAAUAAUGGAACUGCUU | AAGCAGUUCCAUUAUUGCC | | [1354-1372] 3′UTR |
| 428 | ACAAUGUUCAAUUCAGCAA | UUGCUGAAUUGAACAUUGU | | [2035-2053] 3′UTR |
| 429 | GCAACUGGCAGUUUGAGCA | UGCUCAAACUGCCAGUUGC | Dog, Chimp | [210-228] ORF |
| 430 | GGGUUUUUAGACAGGAAGG | CCUUCCUGUCUAAAAACCC | | [1271-1289] 3′UTR |
| 431 | GUAGGAUUAAGUAGGUGAG | CUCACCUACUUAAUCCUAC | | [1289-1307] 3′UTR |
| 432 | UGAAACUCACCGUCCAGAU | AUCUGGACGGUGAGUUUCA | | [1872-1890] 3′UTR |
| 433 | UGAUCCUGUUACUGAUACU | AGUAUCAGUAACAGGAUCA | | [2191-2209] 3′UTR |
| 434 | AUUUCAUGAUUGGGUAGUA | UACUACCCAAUCAUGAAAU | | [808-826] 3′UTR |
| 435 | AGAUGCCUUUAUAAGCUCA | UGAGCUUAUAAAGGCAUCU | | [1461-1479] 3′UTR |
| 436 | CCUCAACGAGGUAAUAUUU | AAAUAUUACCUCGUUGAGG | Chimp | [332-350] ORF |
| 437 | GUUAAGCUCCAAAGGUUCA | UGAACCUUUGGAGCUUAAC | | [2349-2367] 3′UTR |
| 438 | CCUAGCUAUUAGCUCCACU | AGUGGAGCUAAUAGCUAGG | | [2109-2127] 3′UTR |
| 439 | GUAGGGACAGAUGUAUUCA | UGAAUACAUCUGUCCCUAC | | [2147-2165] 3′UTR |
| 440 | UUCUGUGUUUCACAUUCAU | AUGAAUGUGAAACACAGAA | | [911-929] 3′UTR |
| 441 | GGUAGGCUUGGUAAUAGAC | GUCUAUUACCAAGCCUACC | | [1098-1116] 3′UTR |
| 442 | CAGGUGUGAUCCUGUUACU | AGUAACAGGAUCACACCUG | | [2185-2203] 3′UTR |
| 443 | UAUUCAGCUAGUCAGCUAA | UUAGCUGACUAGCUGAAUA | | [831-849] 3′UTR |
| 444 | ACUCUUCAAAUGCUUGGAA | UUCCAAGCAUUUGAAGAGU | | [2263-2281] 3′UTR |
| 445 | UGGACUAGCUUCAGGGACU | AGUCCCUGAAGCUAGUCCA | Chimp | [642-660] ORF |
| 446 | UGCACGUGAACUUGGAAAU | AUUUCCAAGUUCACGUGCA | Dog, Chin, GP, Rat | [526-544] ORF |
| 447 | CAUCGAUGUAGAACUGUUG | CAACAGUUCUACAUCGAUG | | [2425-2443] 3′UTR |
| 448 | GAGCUUACACUUGUGUUUA | UAAACACAAGUGUAAGCUC | Chimp | [606-624] ORF |
| 449 | UGUUUCACAUUCAUAGCAA | UUGCUAUGAAUGUGAAACA | | [916-934] 3′UTR |
| 450 | CCUCACUCUAAUGUUUUAA | UUAAAACAUUAGAGUGAGG | | [1392-1410] 3′UTR |
| 451 | GGCUGAUUUUCUGGCCUUU | AAAGGCCAGAAAAUCAGCC | | [947-965] 3′UTR |
| 452 | UCUGGGAAUUGAAGUAUCU | AGAUACUUCAAUUCCCAGA | | [1732-1750] 3′UTR |
| 453 | CUUUUGAGCUUACACUUGU | ACAAGUGUAAGCUCAAAAG | Chimp | [601-619] ORF |
| 454 | CACUGUUUCUUGGUGACUU | AAGUCACCAAGAAACAGUG | | [1373-1391] 3′UTR |
| 455 | UGUUCAAAUUAGCCAGUGU | ACACUGGCUAAUUUGAACA | | [2231-2249] 3′UTR |
| 456 | AAUGAGAAAUAUUACGGCA | UGCCGUAAUAUUUCUCAUU | | [1339-1357] 3′UTR |
| 457 | CAUGGCAGUGUUAUCUCAU | AUGAGAUAACACUGCCAUG | | [1702-1720] 3′UTR |
| 458 | CUGUUAUGCUUACAAAAUG | CAUUUUGUAAGCAUAACAG | | [2481-2499] 3′UTR |
| 459 | GCUUUCAUAUCCUUGCUGU | ACAGCAAGGAUAUGAAAGC | | [2055-2073] 3′UTR |
| 460 | AGCUAAAGUCAUUUGUAGU | ACUACAAAUGACUUUAGCU | | [844-862] 3′UTR |
| 461 | UCUGUGUUUCACAUUCAUA | UAUGAAUGUGAAACACAGA | | [912-930] 3′UTR |
| 462 | AUUAGCCAGUGUUCUAACA | UGUUAGAACACUGGCUAAU | | [2238-2256] 3′UTR |
| 463 | AGUAGAAGCCCAUUUGAGU | ACUCAAAUGGGCUUCUACU | | [1050-1068] 3′UTR |
| 464 | AUGUAUUCAUCCUGGUGUU | AACACCAGGAUGAAUACAU | | [2157-2175] 3′UTR |
| 465 | GUAGUUGAUUACUCUUCCA | UGGAAGAGUAAUCAACUAC | | [1556-1574] 3′UTR |
| 466 | UGUAAAAAGCUGGAUAGGA | UCCUAUCCAGCUUUUUACA | Chin, GP, Chimp, Rat, Ms | [555-573] ORF |
| 467 | UGUUUUGCAUGUCUAUUGU | ACAAUAGACAUGCAAAACA | | [2332-2350] 3′UTR |
| 468 | CUUCAAAUGCUUGGAAAGA | UCUUUCCAAGCAUUUGAAG | | [2266-2284] 3′UTR |
| 469 | UCAUAGCAACUGCAGCUAA | UUAGCUGCAGUUGCUAUGA | | [926-944] 3′UTR |
| 470 | CAGCCUAGAGAAUGAAACU | AGUUUCAUUCUCUAGGCUG | | [1860-1878] 3′UTR |
| 471 | UAUUACGGCAAUAAUGGAA | UUCCAUUAUUGCCGUAAUA | | [1348-1366] 3′UTR |
| 472 | AAAGGUUCACUGUGUUUCU | AGAAACACAGUGAACCUUU | | [2359-2377] 3′UTR |
| 473 | GUGAUUUUGACUACUGGGA | UCCCAGUAGUCAAAAUCAC | Chimp | [292-310] ORF |
| 474 | AAGCAAAAGUAGAAGCCCA | UGGGCUUCUACUUUUGCUU | | [1043-1061] 3′UTR |
| 475 | GGUUUCCUGCCCUAGCUAU | AUAGCUAGGGCAGGAAACC | | [2099-2117] 3′UTR |
| 476 | CUCUUUUCUUUCUGUGUUU | AAACACAGAAAGAAAAGAG | | [902-920] 3′UTR |
| 477 | GCCCUAGCUAUUAGCUCCA | UGGAGCUAAUAGCUAGGGC | | [2107-2125] 3′UTR |
| 478 | CCAGCAUUUCAGAAUUGCU | AGCAAUUCUGAAAUGCUGG | Chimp | [241-259] ORF |
| 479 | AGGGACUUUUUCUUUAGUA | UACUAAAGAAAAAGUCCCU | | [654-672] ORF |
| 480 | CAAAUGUAGUCUCUUUUCU | AGAAAAGAGACUACAUUUG | | [892-910] 3′UTR |
| 481 | CCAAGAUAAAUCAAUGUUG | CAACAUUGAUUUAUCUUGG | | [2315-2333] 3′UTR |
| 482 | AUGUAUGUAAAAAGCUGGA | UCCAGCUUUUUACAUACAU | Chimp, Ms | [550-568] ORF |
| 483 | CGGUGUUGUUUUAGAUGCC | GGCAUCUAAAACAACACCG | | [1449-1467] 3′UTR |
| 484 | CAGAUUUUUUCCACCUUGG | CCAAGGUGGAAAAAAUCUG | | [1906-1924] 3′UTR |
| 485 | CAAAAGUAGAAGCCCAUUU | AAAUGGGCUUCUACUUUUG | | [1046-1064] 3′UTR |
| 486 | UUAUAGAAUUGGGCCAAGA | UCUUGGCCCAAUUCUAUAA | | [2302-2320] 3′UTR |
| 487 | AAGGUAGGAUUAAGUAGGU | ACCUACUUAAUCCUACCUU | | [1286-1304] 3′UTR |
| 488 | UAAGGAGCUUAUUCAGGUU | AACCUGAAUAAGCUCCUUA | | [2084-2102] 3′UTR |
| 489 | GUGUUGUUUUAGAUGCCUU | AAGGCAUCUAAAACAACAC | | [1451-1469] 3′UTR |
| 490 | GUUUCCUGCCCUAGCUAUU | AAUAGCUAGGGCAGGAAAC | | [2100-2118] 3′UTR |
| 491 | AUUCAGCAAGGCUUUCAUA | UAUGAAAGCCUUGCUGAAU | | [2045-2063] 3′UTR |
| 492 | CAAUUUGGUUUCAGGUAGG | CCUACCUGAAACCAAAUUG | | [1085-1103] 3′UTR |
| 493 | GUUGUUUUAGAUGCCUUUA | UAAAGGCAUCUAAAACAAC | | [1453-1471] 3′UTR |
| 494 | GCAUUGGCUAUGGAGAUAU | AUAUCUCCAUAGCCAAUGC | | [1830-1848] 3′UTR |
| 495 | CUGAGAAACUGACCCAGAG | CUCUGGGUCAGUUUCUCAG | Dog, Chin, GP, Chimp, | [445-463] ORF |
| | | | Rat, Ms | |
| 496 | UAUGCUUACAAAAUGGUGA | UCACCAUUUUGUAAGCAUA | | [2485-2503] 3′UTR |
| 497 | AACUAAACUUGGUUGCUCA | UGAGCAACCAAGUUUAGUU | Chimp | [413-431] ORF |
| 498 | AAUGCUUGGAAAGAUACUA | UAGUAUCUUUCCAAGCAUU | | [2271-2289] 3′UTR |
| 499 | GUCUGUCCAAAUCAAAGCA | UGCUUUGAUUUGGACAGAC | Dog, Chimp | [394-412] ORF |
| 500 | AUUGCUGGACUGUGGCUAU | AUAGCCACAGUCCAGCAAU | Chimp | [254-272] ORF |

TABLE C
21 mers

| | | | | |
|---|---|---|---|---|
| Number | Sense siRNA | AntiSense siRNA | Other Sp | Hum-34222182 ORF: 204-785 |

| | | | | |
|---|---|---|---|---|
| 1 | GCCAGUGUUCUAACAAACUAA | UUAGUUUGUUAGAACACUGGC | | [2242-2262](21/21) 3′UTR |
| 2 | GGAUGGAAUAGGUAAGCAAAA | UUUUGCUUACCUAUUCCAUCC | | [1030-1050](21/21) 3′UTR |
| 3 | GGAUUAAGUAGGUGAGUUUAA | UUAAACUCACCUACUUAAUCC | | [1292-1312](21/21) 3′UTR |
| 4 | CCACCUGCCCUAAAUAAGAAA | UUUCUUAUUUAGGGCAGGUGG | | [868-888](21/21) 3′UTR |
| 5 | CAGUGUUCUAACAAACUAAAC | GUUUAGUUUGUUAGAACACUG | | [2244-2264](21/21) 3′UTR |
| 6 | CAGUGAUUGAAGGGUCCUAAA | UUUAGGACCCUUCAAUCACUG | | [766-786](21/21) ORF + 3′UTR |
| 7 | GCUGGAGAACUGUCUGUCCAA | UUGGACAGACAGUUCUCCAGC | Dog, Chimp | [383-403](21/21) ORF |
| 8 | GAGUGAAUGAUGAAUACCUGU | ACAGGUAUUCAUCAUUCACUC | | [1577-1597](21/21) 3′UTR |
| 9 | GGAUUUCGACUUGUUAAGAAA | UUUCUUAACAAGUCGAAAUCC | Rat | [720-740](21/21) ORF |
| 10 | GGAAAUUAGUUCUGAGAUCUA | UAGAUCUCAGAACUAAUUUCC | | [1605-1625](21/21) 3′UTR |
| 11 | ACGUGAACUUGGAAAUUGAAA | UUUCAAUUUCCAAGUUCACGU | Dog, Chin, GP, Rat | [529-549](21/21) ORF |
| 12 | UAGCCAGUGUUCUAACAAACU | AGUUUGUUAGAACACUGGCUA | | [2240-2260](21/21) 3′UTR |
| 13 | CAUCCUGGUGUUACUGAAAAA | UUUUUCAGUAACACCAGGAUG | | [2164-2184](21/21) 3′UTR |
| 14 | AGCCAGUGUUCUAACAAACUA | UAGUUUGUUAGAACACUGGCU | | [2241-2261](21/21) 3′UTR |
| 15 | CGUGAACUUGGAAAUUGAAAA | UUUUCAAUUUCCAAGUUCACG | Dog, Chin, GP, Rat | [530-550](21/21) ORF |
| 16 | UGGGCUUUUCUGGGAAUUGAA | UUCAAUUCCCAGAAAAGCCCA | | [1724-1744](21/21) 3′UTR |
| 17 | GGAAAGAUACUACAAAGCCAA | UUGGCUUUGUAGUAUCUUUCC | | [2278-2298](21/21) 3′UTR |
| 18 | CACGUGAACUUGGAAAUUGAA | UUCAAUUUCCAAGUUCACGUG | Dog, Chin, GP, Rat | [528-548](21/21) ORF |
| 19 | GCACGUGAACUUGGAAAUUGA | UCAAUUUCCAAGUUCACGUGC | Dog, Chin, GP, Rat | [527-547](21/21) ORF |
| 20 | GGCUUAUGGAAGGCUGUUAAA | UUUAACAGCCUUCCAUAAGCC | | [2505-2525](21/21) 3′UTR |
| 21 | GGAGAUAUGGUUUAUAGUACA | UGUACUAUAAACCAUAUCUCC | | [1841-1861](21/21) 3′UTR |
| 22 | GGGAUGGAAUAGGUAAGCAAA | UUUGCUUACCUAUUCCAUCCC | | [1029-1049](21/21) 3′UTR |
| 23 | CAAUGUUGUUUUGCAUGUCUA | UAGACAUGCAAAACAACAUUG | | [2326-2346](21/21) 3′UTR |
| 24 | AGUACAGCCUAGAGAAUGAAA | UUUCAUUCUCUAGGCUGUACU | | [1856-1876](21/21) 3′UTR |
| 25 | CUUUGGAGAAGUGAUUCAAAA | UUUUGAAUCACUUCUCCAAAG | | [962-982](21/21) 3′UTR |
| 26 | CCUUUGGAGAAGUGAUUCAAA | UUUGAAUCACUUCUCCAAAGG | | [961-981](21/21) 3′UTR |
| 27 | CAGAAUUGAAUGGGAUGGAAU | AUUCCAUCCCAUUCAAUUCUG | | [1018-1038](21/21) 3′UTR |
| 28 | UGGGAUGGAAUAGGUAAGCAA | UUGCUUACCUAUUCCAUCCCA | | [1028-1048](21/21) 3′UTR |
| 29 | CCAGAUUUUUUCCACCUUGGA | UCCAAGGUGGAAAAAAUCUGG | | [1905-1925](21/21) 3′UTR |
| 30 | GAAGGGUCCUAAAAAGGGAAA | UUUCCCUUUUUAGGACCCUUC | | [774-794](21/21) ORF + 3′UTR |
| 31 | CUUCCUCACUCUAAUGUUUUA | UAAAACAUUAGAGUGAGGAAG | | [1389-1409](21/21) 3′UTR |
| 32 | GAACUGUCUGUCCAAAUCAAA | UUUGAUUUGGACAGACAGUUC | Dog, Chimp | [389-409](21/21) ORF |
| 33 | CAACAAUGUUCAAUUCAGCAA | UUGCUGAAUUGAACAUUGUUG | | [2033-2053](21/21) 3′UTR |
| 34 | CUAGGUAAGAGUAAAUGAGAA | UUCUCAUUUACUCUUACCUAG | | [1326-1346](21/21) 3′UTR |
| 35 | AGUGAUUGAAGGGUCCUAAAA | UUUUAGGACCCUUCAAUCACU | | [767-787](21/21) ORF + 3′UTR |
| 36 | GUGAUUGAAGGGUCCUAAAAA | UUUUUAGGACCCUUCAAUCAC | | [768-788](21/21) ORF + 3′UTR |
| 37 | GAAUGAUGAAUACCUGUGAGG | CCUCACAGGUAUUCAUCAUUC | | [1581-1601](21/21) 3′UTR |
| 38 | CCUCUCUGAUUCACUUAGUAA | UUACUAAGUGAAUCAGAGAGG | | [1629-1649](21/21) 3′UTR |
| 39 | AGAUUUUUUCCACCUUGGAUA | UAUCCAAGGUGGAAAAAAUCU | | [1907-1927](21/21) 3′UTR |
| 40 | GAAUUUAGCCUCCACUCAACA | UGUUGAGUGGAGGCUAAAUUC | | [2017-2037](21/21) 3′UTR |
| 41 | GAAUAGGUAAGCAAAAGUAGA | UCUACUUUUGCUUACCUAUUC | | [1035-1055](21/21) 3′UTR |
| 42 | GGUCGUGGAUAAGGAGCUUAU | AUAAGCUCCUUAUCCACGACC | | [2075-2095](21/21) 3′UTR |
| 43 | GGCUUGGUAAUAGACUAUAUA | UAUAUAGUCUAUUACCAAGCC | | [1102-1122](21/21) 3′UTR |
| 44 | CUGUCACUAGGGAAUAAUAAA | UUUAUUAUUCCCUAGUGACAG | | [1929-1949](21/21) 3′UTR |
| 45 | CUUGGUGACUUCCUCACUCUA | UAGAGUGAGGAAGUCACCAAG | | [1381-1401](21/21) 3′UTR |
| 46 | CCUAGGUAAGAGUAAAUGAGA | UCUCAUUUACUCUUACCUAGG | | [1325-1345](21/21) 3′UTR |
| 47 | GCUUGUGGUGCCAUUUCAGUA | UACUGAAAUGGCACCACAAGC | | [1424-1444](21/21) 3′UTR |
| 48 | GAUGAAUACCUGUGAGGAUAG | CUAUCCUCACAGGUAUUCAUC | | [1585-1605](21/21) 3′UTR |
| 49 | GGUGUGAUCCUGUUACUGAUA | UAUCAGUAACAGGAUCACACC | | [2187-2207](21/21) 3′UTR |
| 50 | GGGUCGUGGAUAAGGAGCUUA | UAAGCUCCUUAUCCACGACCC | | [2074-2094](21/21) 3′UTR |
| 51 | ACCUAAAAUGUCACUGUUCAA | UUGAACAGUGACAUUUUAGGU | | [2217-2237](21/21) 3′UTR |
| 52 | GAUCCUGUUACUGAUACUAUA | UAUAGUAUCAGUAACAGGAUC | | [2192-2212](21/21) 3′UTR |
| 53 | CAAAGGUCCUUGUCCCUGAGA | UCUCAGGGACAAGGACCUUUG | Chimp | [430-450](21/21) ORF |
| 54 | AAAUGGUGAUGGCUUAUGGAA | UUCCAUAAGCCAUCACCAUUU | | [2495-2515](21/21) 3′UTR |
| 55 | CGUAGGGACAGAUGUAUUCAU | AUGAAUACAUCUGUCCCUACG | | [2146-2166](21/21) 3′UTR |
| 56 | AUAGAAUUGGGCCAAGAUAAA | UUUAUCUUGGCCCAAUUCUAU | | [2304-2324](21/21) 3′UTR |
| 57 | GAAAGAUACUACAAAGCCAAU | AUUGGCUUUGUAGUAUCUUUC | | [2279-2299](21/21) 3′UTR |
| 58 | GCUUCAGGGACUUUUUCUUUA | UAAAGAAAAAGUCCCUGAAGC | Chimp | [649-669](21/21) ORF |
| 59 | CAUGAUUGGGUAGUAAAACUA | UAGUUUUACUACCCAAUCAUG | | [812-832](21/21) 3′UTR |
| 60 | AAUUAGCCAGUGUUCUAACAA | UUGUUAGAACACUGGCUAAUU | | [2237-2257](21/21) 3′UTR |
| 61 | UCAGGUAGGCUUGGUAAUAGA | UCUAUUACCAAGCCUACCUGA | | [1095-1115](21/21) 3′UTR |
| 62 | UGAAUGGGAUGGAAUAGGUAA | UUACCUAUUCCAUCCCAUUCA | | [1024-1044](21/21) 3′UTR |
| 63 | CGGUGUUGUUUUAGAUGCCUU | AAGGCAUCUAAAACAACACCG | | [1449-1469](21/21) 3′UTR |
| 64 | GGUUUCAGGUAGGCUUGGUAA | UUACCAAGCCUACCUGAAACC | | [1091-1111](21/21) 3′UTR |
| 65 | GCUGAUUUUCUGGCCUUUGGA | UCCAAAGGCCAGAAAAUCAGC | | [948-968](21/21) 3′UTR |
| 66 | CCUCCACUCAACAAUGUUCAA | UUGAACAUUGUUGAGUGGAGG | | [2025-2045](21/21) 3′UTR |
| 67 | GCUGUAUACUACCACUUUGAA | UUCAAAGUGGUAGUAUACAGC | | [1780-1800](21/21) 3′UTR |
| 68 | CGAAGGAAACAGAGCCGUUGA | UCAACGGCUCUGUUUCCUUCG | Chimp | [181-201](21/21) 5′UTR |
| 69 | UGAGCUUACACUUGUGUUUAA | UUAAACACAAGUGUAAGCUCA | Chimp | [605-625](21/21) ORF |
| 70 | CGGCGUAGGGACAGAUGUAUU | AAUACAUCUGUCCCUACGCCG | | [2143-2163](21/21) 3′UTR |
| 71 | AGAAUUGAAUGGGAUGGAAUA | UAUUCCAUCCCAUUCAAUUCU | | [1019-1039](21/21) 3′UTR |
| 72 | CAGAGAGCCUGCUAAGUGAUU | AAUCACUUAGCAGGCUCUCUG | Chimp | [277-297](21/21) ORF |
| 73 | UAUAGAAUUGGGCCAAGAUAA | UUAUCUUGGCCCAAUUCUAUA | | [2303-2323](21/21) 3′UTR |
| 74 | CUCAGGAUUUCGACUUGUUAA | UUAACAAGUCGAAAUCCUGAG | | [716-736](21/21) ORF |
| 75 | CUUCAAAUGCUUGGAAAGAUA | UAUCUUUCCAAGCAUUUGAAG | | [2266-2286](21/21) 3′UTR |
| 76 | GGUCCUAAAAAGGGAAAAUAU | AUAUUUUCCCUUUUUAGGACC | | [778-798](21/21) ORF + 3′UTR |
| 77 | UGGAGAACUGUCUGUCCAAAU | AUUUGGACAGACAGUUCUCCA | Dog, Chimp | [385-405](21/21) ORF |
| 78 | GCUCAGGAUUUCGACUUGUUA | UAACAAGUCGAAAUCCUGAGC | | [715-735](21/21) ORF |
| 79 | GAGCCUGCUAAGUGAUUUUGA | UCAAAAUCACUUAGCAGGCUC | Chimp | [281-301](21/21) ORF |
| 80 | UGAUGAAUACCUGUGAGGAUA | UAUCCUCACAGGUAUUCAUCA | | [1584-1604](21/21) 3′UTR |
| 81 | GAGAAUUUAGCCUCCACUCAA | UUGAGUGGAGGCUAAAUUCUC | | [2015-2035](21/21) 3′UTR |
| 82 | GGCCUUUGGAGAAGUGAUUCA | UGAAUCACUUCUCCAAAGGCC | | [959-979](21/21) 3′UTR |
| 83 | UGAAGGGUUUUUAGACAGGAA | UUCCUGUCUAAAAACCCUUCA | | [1267-1287](21/21) 3′UTR |
| 84 | GAGGAAUCAACUUGCCAGAAU | AUUCUGGCAAGUUGAUUCCUC | Chimp | [351-371](21/21) ORF |
| 85 | AGGAUUUCGACUUGUUAAGAA | UUCUUAACAAGUCGAAAUCCU | | [719-739](21/21) ORF |
| 86 | AGUUCCUGACUCAAAUUUGAA | UUCAAAUUUGAGUCAGGAACU | | [1250-1270](21/21) 3′UTR |
| 87 | ACAGGAAGGUAGGAUUAAGUA | UACUUAAUCCUACCUUCCUGU | | [1281-1301](21/21) 3′UTR |
| 88 | CUUGCUGUGGGUCGUGGAUAA | UUAUCCACGACCCACAGCAAG | | [2066-2086](21/21) 3′UTR |
| 89 | GCUGGAUAGGAUUGUGUGUGA | UCACACACAAUCCUAUCCAGC | Chin, GP, Chimp, Rat | [563-583](21/21) ORF |
| 90 | UUAUGUUGUUCCUGAACCCAA | UUGGGUUCAGGAACAACAUAA | Chimp | [311-331](21/21) ORF |
| 91 | CCUAAAAUGUCACUGUUCAAA | UUUGAACAGUGACAUUUUAGG | | [2218-2238](21/21) 3′UTR |
| 92 | GAUAGGAAAUUAGUUCUGAGA | UCUCAGAACUAAUUUCCUAUC | | [1601-1621](21/21) 3′UTR |
| 93 | GUUUCAGGUAGGCUUGGUAAU | AUUACCAAGCCUACCUGAAAC | | [1092-1112](21/21) 3′UTR |
| 94 | GAUUUUCUGGCCUUUGGAGAA | UUCUCCAAAGGCCAGAAAAUC | | [951-971](21/21) 3′UTR |
| 95 | CUGUGAGGAUAGGAAAUUAGU | ACUAAUUUCCUAUCCUCACAG | | [1594-1614](21/21) 3′UTR |
| 96 | GGUAGGCUUGGUAAUAGACUA | UAGUCUAUUACCAAGCCUACC | | [1098-1118](21/21) 3′UTR |
| 97 | GAAUGAAACUCACCGUCCAGA | UCUGGACGGUGAGUUUCAUUC | | [1869-1889](21/21) 3′UTR |
| 98 | CGUGGAUAAGGAGCUUAUUCA | UGAAUAAGCUCCUUAUCCACG | | [2078-2098](21/21) 3′UTR |
| 99 | GUGAAUGAUGAAUACCUGUGA | UCACAGGUAUUCAUCAUUCAC | | [1579-1599](21/21) 3′UTR |
| 100 | AAUUUAGCCUCCACUCAACAA | UUGUUGAGUGGAGGCUAAAUU | | [2018-2038](21/21) 3′UTR |
| 101 | GGAGAAGUGAUUCAAAAUAGU | ACUAUUUUGAAUCACUUCUCC | | [966-986](21/21) 3′UTR |
| 102 | CCACCAGUUCCUGACUCAAAU | AUUUGAGUCAGGAACUGGUGG | | [1245-1265](21/21) 3′UTR |
| 103 | UAGACAGGAAGGUAGGAUUAA | UUAAUCCUACCUUCCUGUCUA | | [1278-1298](21/21) 3′UTR |
| 104 | UGGGAUUAUGUUGUUCCUGAA | UUCAGGAACAACAUAAUCCCA | Chimp | [306-326](21/21) ORF |
| 105 | AAUUGGGCCAAGAUAAAUCAA | UUGAUUUAUCUUGGCCCAAUU | | [2308-2328](21/21) 3′UTR |
| 106 | GGAUAAGGAGCUUAUUCAGGU | ACCUGAAUAAGCUCCUUAUCC | | [2081-2101](21/21) 3′UTR |
| 107 | AUUAGCCAGUGUUCUAACAAA | UUUGUUAGAACACUGGCUAAU | | [2238-2258](21/21) 3′UTR |
| 108 | UGGCUAUGGAGAUAUGGUUUA | UAAACCAUAUCUCCAUAGCCA | | [1834-1854](21/21) 3′UTR |
| 109 | GUCCAAAUCAAAGCAAACUAA | UUAGUUUGCUUUGAUUUGGAC | Chimp | [398-418](21/21) ORF |
| 110 | UGGAUACCUGUCACUAGGGAA | UUCCCUAGUGACAGGUAUCCA | | [1922-1942](21/21) 3′UTR |
| 111 | CCACCUUGGAUACCUGUCACU | AGUGACAGGUAUCCAAGGUGG | | [1916-1936](21/21) 3′UTR |
| 112 | AUGUGCUUAAUCUCAGAUGAA | UUCAUCUGAGAUUAAGCACAU | | [1672-1692](21/21) 3′UTR |
| 113 | CCAUUGAGUGAAUGAUGAAUA | UAUUCAUCAUUCACUCAAUGG | | [1572-1592](21/21) 3′UTR |
| 114 | CCUUUUUCCACUAACAGUUAU | AUAACUGUUAGUGGAAAAAGG | | [2445-2465](21/21) 3′UTR |
| 115 | GGUCAAUUUACGAAGUCUGCA | UGCAGACUUCGUAAAUUGACC | | [1812-1832](21/21) 3′UTR |
| 116 | CCCUCUCUGAUUCACUUAGUA | UACUAAGUGAAUCAGAGAGGG | | [1628-1648](21/21) 3′UTR |
| 117 | CUGUUGUCCUUUUUCCACUAA | UUAGUGGAAAAAGGACAACAG | | [2438-2458](21/21) 3′UTR |
| 118 | UGCUUGGAAAGAUACUACAAA | UUUGUAGUAUCUUUCCAAGCA | | [2273-2293](21/21) 3′UTR |
| 119 | CAAUUCAGCAAGGCUUUCAUA | UAUGAAAGCCUUGCUGAAUUG | | [2043-2063](21/21) 3′UTR |
| 120 | GUGUGUGAUUCUAGCGUCGUA | UACGACGCUAGAAUCACACAC | | [576-596](21/21) ORF |
| 121 | CCUGCUAAGUGAUUUUGACUA | UAGUCAAAAUCACUUAGCAGG | Chimp | [284-304](21/21) ORF |
| 122 | CUCUCUUGCCUGUUAUGCUUA | UAAGCAUAACAGGCAAGAGAG | | [2472-2492](21/21) 3′UTR |
| 123 | GUUAUGCACGUGAACUUGGAA | UUCCAAGUUCACGUGCAUAAC | Dog, Chin, GP, Rat | [522-542](21/21) ORF |
| 124 | CAAAAGUAGAAGCCCAUUUGA | UCAAAUGGGCUUCUACUUUUG | | [1046-1066](21/21) 3′UTR |
| 125 | GCUAUUAGCUCCACUUCACAU | AUGUGAAGUGGAGCUAAUAGC | | [2113-2133](21/21) 3′UTR |
| 126 | AGUUGAUUACUCUUCCAUUGA | UCAAUGGAAGAGUAAUCAACU | | [1558-1578](21/21) 3′UTR |
| 127 | GAAUUUGGUUAAAAUGCUGGA | UCCAGCAUUUUAACCAAAUUC | Chimp | [368-388](21/21) ORF |
| 128 | GGGCUUUUCUGGGAAUUGAAG | CUUCAAUUCCCAGAAAAGCCC | | [1725-1745](21/21) 3′UTR |
| 129 | UUGCCUGUUAUGCUUACAAAA | UUUUGUAAGCAUAACAGGCAA | | [2477-2497](21/21) 3′UTR |
| 130 | GAGGUUGUGUUAUGCACGUGA | UCACGUGCAUAACACAACCUC | | [514-534](21/21) ORF |
| 131 | GAAGCCCAUUUGAGUUUUACA | UGUAAAACUCAAAUGGGCUUC | | [1054-1074](21/21) 3′UTR |
| 132 | GGCUUUUCUGGGAAUUGAAGU | ACUUCAAUUCCCAGAAAAGCC | | [1726-1746](21/21) 3′UTR |
| 133 | CCAAAUGUAGUCUCUUUUCUU | AAGAAAAGAGACUACAUUUGG | | [891-911](21/21) 3′UTR |
| 134 | AGCUGUAUACUACCACUUUGA | UCAAAGUGGUAGUAUACAGCU | | [1779-1799](21/21) 3′UTR |
| 135 | UAACCAUGCAUGCACCCAGAU | AUCUGGGUGCAUGCAUGGUUA | | [1890-1910](21/21) 3′UTR |
| 136 | CUGGGAUUAUGUUGUUCCUGA | UCAGGAACAACAUAAUCCCAG | Chimp | [305-325](21/21) ORF |
| 137 | GGGCAUCGAUGUAGAACUGUU | AACAGUUCUACAUCGAUGCCC | | [2422-2442](21/21) 3′UTR |
| 138 | CUGAGAAACUGACCCAGAGAA | UUCUCUGGGUCAGUUUCUCAG | Chin, GP, Chimp, Rat, Ms | [445-465](21/21) ORF |
| 139 | GGUGUUGUUUUAGAUGCCUUU | AAAGGCAUCUAAAACAACACC | | [1450-1470](21/21) 3′UTR |
| 140 | CUGGCAGUUUGAGCAGCAAGA | UCUUGCUGCUCAAACUGCCAG | Chimp | [214-234](21/21) ORF |
| 141 | CAUUUCACCAUGGCAGUGUUA | UAACACUGCCAUGGUGAAAUG | | [1694-1714](21/21) 3′UTR |
| 142 | UUCCAUUGAGUGAAUGAUGAA | UUCAUCAUUCACUCAAUGGAA | | [1570-1590](21/21) 3′UTR |
| 143 | GGUUGUGUUAUGCACGUGAAC | GUUCACGUGCAUAACACAACC | Ms | [516-536](21/21) ORF |
| 144 | CAGUAACCACGGUGUUGUUUU | AAAACAACACCGUGGUUACUG | | [1440-1460](21/21) 3′UTR |
| 145 | AGGAGAACUGCUCAUGGACUA | UAGUCCAUGAGCAGUUCUCCU | Dog, Chimp | [628-648](21/21) ORF |
| 146 | CCUGUUCUUAAGUGUUGAAUA | UAUUCAACACUUAAGAACAGG | | [1486-1506](21/21) 3′UTR |
| 147 | UCAUCCUGGUGUUACUGAAAA | UUUUCAGUAACACCAGGAUGA | | [2163-2183](21/21) 3′UTR |
| 148 | UGAAGGGUCCUAAAAAGGGAA | UUCCCUUUUUAGGACCCUUCA | | [773-793](21/21) ORF + 3′UTR |
| 149 | GCUAUGGAGAUAUGGUUUAUA | UAUAAACCAUAUCUCCAUAGC | | [1836-1856](21/21) 3′UTR |
| 150 | UUAGCCAGUGUUCUAACAAAC | GUUUGUUAGAACACUGGCUAA | | [2239-2259](21/21) 3′UTR |
| 151 | GGGUUUUUAGACAGGAAGGUA | UACCUUCCUGUCUAAAAACCC | | [1271-1291](21/21) 3′UTR |
| 152 | UGUCUAUUGUUAAGCUCCAAA | UUUGGAGCUUAACAAUAGACA | | [2341-2361](21/21) 3′UTR |
| 153 | GAAUACCUGUGAGGAUAGGAA | UUCCUAUCCUCACAGGUAUUC | | [1588-1608](21/21) 3′UTR |
| 154 | CCUGUCACUAGGGAAUAAUAA | UUAUUAUUCCCUAGUGACAGG | | [1928-1948](21/21) 3′UTR |
| 155 | UAUUCAUCCUGGUGUUACUGA | UCAGUAACACCAGGAUGAAUA | | [2160-2180](21/21) 3′UTR |
| 156 | GGAAUCAACUUGCCAGAAUUU | AAAUUCUGGCAAGUUGAUUCC | Chimp | [353-373](21/21) ORF |
| 157 | UGUAAAAAGCUGGAUAGGAUU | AAUCCUAUCCAGCUUUUUACA | Chin, GP, Chimp, Rat | [555-575](21/21) ORF |
| 158 | UGGAUAGGAUUGUGUGUGAUU | AAUCACACACAAUCCUAUCCA | Chimp | [565-585](21/21) ORF |
| 159 | CUGUAUACUACCACUUUGAAU | AUUCAAAGUGGUAGUAUACAG | | [1781-1801](21/21) 3′UTR |
| 160 | GGAUAGGAAAUUAGUUCUGAG | CUCAGAACUAAUUUCCUAUCC | | [1600-1620](21/21) 3′UTR |
| 161 | AAACUAAACUUGGUUGCUCAA | UUGAGCAACCAAGUUUAGUUU | Chimp | [412-432](21/21) ORF |
| 162 | CAGAUUUUUUCCACCUUGGAU | AUCCAAGGUGGAAAAAAUCUG | | [1906-1926](21/21) 3′UTR |
| 163 | AAGGUAGGAUUAAGUAGGUGA | UCACCUACUUAAUCCUACCUU | | [1286-1306](21/21) 3′UTR |
| 164 | AGAACUGUCUGUCCAAAUCAA | UUGAUUUGGACAGACAGUUCU | Dog, Chimp | [388-408](21/21) ORF |
| 165 | CAUAGAUCCCAUUUUUGUACA | UGUACAAAAAUGGGAUCUAUG | | [999-1019](21/21) 3′UTR |
| 166 | GAUUCUAGCGUCGUACCUACU | AGUAGGUACGACGCUAGAAUC | | [582-602](21/21) ORF |
| 167 | CCAGAGAGCCUGCUAAGUGAU | AUCACUUAGCAGGCUCUCUGG | Chimp | [276-296](21/21) ORF |
| 168 | CACUUAGUAAUCUAUCCUCUU | AAGAGGAUAGAUUACUAAGUG | | [1640-1660](21/21) 3′UTR |
| 169 | ACUUCCUCACUCUAAUGUUUU | AAAACAUUAGAGUGAGGAAGU | | [1388-1408](21/21) 3′UTR |
| 170 | CCUGAGAAACUGACCCAGAGA | UCUCUGGGUCAGUUUCUCAGG | Chin, GP, Chimp, Rat, Ms | [444-464](21/21) ORF |
| 171 | AGGUUGUGUUAUGCACGUGAA | UUCACGUGCAUAACACAACCU | | [515-535](21/21) ORF |
| 172 | GCCUUUGGAGAAGUGAUUCAA | UUGAAUCACUUCUCCAAAGGC | | [960-980](21/21) 3′UTR |
| 173 | GAGAACUGUCUGUCCAAAUCA | UGAUUUGGACAGACAGUUCUC | Dog, Chimp | [387-407](21/21) ORF |
| 174 | AACUCUUCAAAUGCUUGGAAA | UUUCCAAGCAUUUGAAGAGUU | | [2262-2282](21/21) 3′UTR |
| 175 | CAACGAGGUAAUAUUUGAGGA | UCCUCAAAUAUUACCUCGUUG | Chimp | [335-355](21/21) ORF |
| 176 | GGAAUAGGUAAGCAAAAGUAG | CUACUUUUGCUUACCUAUUCC | | [1034-1054](21/21) 3′UTR |
| 177 | GUGUAGAUUUUCUGCAUAGAU | AUCUAUGCAGAAAAUCUACAC | | [985-1005](21/21) 3′UTR |
| 178 | CACUCAACAAUGUUCAAUUCA | UGAAUUGAACAUUGUUGAGUG | | [2029-2049](21/21) 3′UTR |
| 179 | UCAACAAUGUUCAAUUCAGCA | UGCUGAAUUGAACAUUGUUGA | | [2032-2052](21/21) 3′UTR |
| 180 | GAAUUGGGCCAAGAUAAAUCA | UGAUUUAUCUUGGCCCAAUUC | | [2307-2327](21/21) 3′UTR |
| 181 | CUGUUAUGCUUACAAAAUGGU | ACCAUUUUGUAAGCAUAACAG | | [2481-2501](21/21) 3′UTR |
| 182 | GUCUGUCCAAAUCAAAGCAAA | UUUGCUUUGAUUUGGACAGAC | Dog, Chimp | [394-414](21/21) ORF |
| 183 | GGAAUUGAAGUAUCUCUCCUU | AAGGAGAGAUACUUCAAUUCC | | [1736-1756](21/21) 3′UTR |
| 184 | GAAGUCUGCAUUGGCUAUGGA | UCCAUAGCCAAUGCAGACUUC | | [1823-1843](21/21) 3′UTR |
| 185 | CUCUCUGAUUCACUUAGUAAU | AUUACUAAGUGAAUCAGAGAG | | [1630-1650](21/21) 3′UTR |
| 186 | AGUCCCUCUCUGAUUCACUUA | UAAGUGAAUCAGAGAGGGACU | | [1625-1645](21/21) 3′UTR |
| 187 | GGGUCCUAAAAAGGGAAAAUA | UAUUUUCCCUUUUUAGGACCC | | [777-797](21/21) ORF + 3′UTR |
| 188 | CAACCUCAACGAGGUAAUAUU | AAUAUUACCUCGUUGAGGUUG | Chimp | [329-349](21/21) ORF |
| 189 | CUAUUCAGCUAGUCAGCUAAA | UUUAGCUGACUAGCUGAAUAG | | [830-850](21/21) 3′UTR |
| 190 | GAUUGGAACAACAGUGAUUGA | UCAAUCACUGUUGUUCCAAUC | | [755-775](21/21) ORF |
| 191 | AGAUCUAGUCCCUCUCUGAUU | AAUCAGAGAGGGACUAGAUCU | | [1619-1639](21/21) 3′UTR |
| 192 | UUACGAAGUCUGCAUUGGCUA | UAGCCAAUGCAGACUUCGUAA | | [1819-1839](21/21) 3′UTR |
| 193 | GCUUUUCUGGGAAUUGAAGUA | UACUUCAAUUCCCAGAAAAGC | | [1727-1747](21/21) 3′UTR |
| 194 | GAAGGGUUUUUAGACAGGAAG | CUUCCUGUCUAAAAACCCUUC | | [1268-1288](21/21) 3′UTR |
| 195 | GGCUUCUUGGGCAUCGAUGUA | UACAUCGAUGCCCAAGAAGCC | | [2414-2434](21/21) 3′UTR |
| 196 | UGGUUGCAACUGGCAGUUUGA | UCAAACUGCCAGUUGCAACCA | Chimp | [205-225](21/21) ORF |
| 197 | ACCAGAUUUGCCUAUUUUGAU | AUCAAAAUAGGCAAAUCUGGU | | [1124-1144](21/21) 3′UTR |
| 198 | UGUUAUGCACGUGAACUUGGA | UCCAAGUUCACGUGCAUAACA | Dog, Chin, GP, Rat, Ms | [521-541](21/21) ORF |
| 199 | UGGUGACUUCCUCACUCUAAU | AUUAGAGUGAGGAAGUCACCA | | [1383-1403](21/21) 3′UTR |
| 200 | CAUGCACCCAGAUUUUUUCCA | UGGAAAAAAUCUGGGUGCAUG | | [1898-1918](21/21) 3′UTR |
| 201 | UGGCUUAUGGAAGGCUGUUAA | UUAACAGCCUUCCAUAAGCCA | | [2504-2524](21/21) 3′UTR |
| 202 | UGUUCCUGAACCCAACCUCAA | UUGAGGUUGGGUUCAGGAACA | Chimp | [317-337](21/21) ORF |
| 203 | GACAGGAAGGUAGGAUUAAGU | ACUUAAUCCUACCUUCCUGUC | | [1280-1300](21/21) 3′UTR |
| 204 | CUUAACCCUAGGUAAGAGUAA | UUACUCUUACCUAGGGUUAAG | | [1319-1339](21/21) 3′UTR |
| 205 | CUUUACUCACUGAUUGGAACA | UGUUCCAAUCAGUGAGUAAAG | | [744-764](21/21) ORF |
| 206 | ACCACCAGUUCCUGACUCAAA | UUUGAGUCAGGAACUGGUGGU | | [1244-1264](21/21) 3′UTR |
| 207 | GGGCCAAGAUAAAUCAAUGUU | AACAUUGAUUUAUCUUGGCCC | | [2312-2332](21/21) 3′UTR |
| 208 | UGAAACGGGUCAAUUUACGAA | UUCGUAAAUUGACCCGUUUCA | | [1805-1825](21/21) 3′UTR |
| 209 | CAAGGCUUCUUGGGCAUCGAU | AUCGAUGCCCAAGAAGCCUUG | | [2411-2431](21/21) 3′UTR |
| 210 | CACCACCAGUUCCUGACUCAA | UUGAGUCAGGAACUGGUGGUG | | [1243-1263](21/21) 3′UTR |
| 211 | UGAGGAAUCAACUUGCCAGAA | UUCUGGCAAGUUGAUUCCUCA | Chimp | [350-370](21/21) ORF |
| 212 | AAUUCAGCAAGGCUUUCAUAU | AUAUGAAAGCCUUGCUGAAUU | | [2044-2064](21/21) 3′UTR |
| 213 | CUUUAUAGAAUUGGGCCAAGA | UCUUGGCCCAAUUCUAUAAAG | | [2300-2320](21/21) 3′UTR |
| 214 | UGACCAUGGUUGCAACUGGCA | UGCCAGUUGCAACCAUGGUCA | Chimp | [199-219](21/21) 5′UTR + ORF |
| 215 | UGAUUUUCUGGCCUUUGGAGA | UCUCCAAAGGCCAGAAAAUCA | | [950-970](21/21) 3′UTR |
| 216 | UAGGGAAUAAUAAAGGCCUUA | UAAGGCCUUUAUUAUUCCCUA | | [1936-1956](21/21) 3′UTR |
| 217 | CCUCAACGAGGUAAUAUUUGA | UCAAAUAUUACCUCGUUGAGG | Chimp | [332-352](21/21) ORF |
| 218 | GGGAAUAAUAAAGGCCUUAUU | AAUAAGGCCUUUAUUAUUCCC | | [1938-1958](21/21) 3′UTR |
| 219 | GUAGGCUUGGUAAUAGACUAU | AUAGUCUAUUACCAAGCCUAC | | [1099-1119](21/21) 3′UTR |
| 220 | UGUCUGUCCAAAUCAAAGCAA | UUGCUUUGAUUUGGACAGACA | Dog, Chimp | [393-413](21/21) ORF |
| 221 | CUUGUGGUGCCAUUUCAGUAA | UUACUGAAAUGGCACCACAAG | | [1425-1445](21/21) 3′UTR |
| 222 | CCCAUUUUUGUACAGAAUUGA | UCAAUUCUGUACAAAAAUGGG | | [1006-1026](21/21) 3′UTR |
| 223 | GGUAGUAAAACUAUUCAGCUA | UAGCUGAAUAGUUUUACUACC | | [820-840](21/21) 3′UTR |
| 224 | UUAUGCACGUGAACUUGGAAA | UUUCCAAGUUCACGUGCAUAA | Dog, Chin, GP, Rat | [523-543](21/21) ORF |
| 225 | UUGGUGACUUCCUCACUCUAA | UUAGAGUGAGGAAGUCACCAA | | [1382-1402](21/21) 3′UTR |
| 226 | UUGAAUGGGAUGGAAUAGGUA | UACCUAUUCCAUCCCAUUCAA | | [1023-1043](21/21) 3′UTR |
| 227 | UGGAAUAGGUAAGCAAAAGUA | UACUUUUGCUUACCUAUUCCA | | [1033-1053](21/21) 3′UTR |
| 228 | AAUGCUUGGAAAGAUACUACA | UGUAGUAUCUUUCCAAGCAUU | | [2271-2291](21/21) 3′UTR |
| 229 | UUGUCAAGGGUAGUAGCUGUA | UACAGCUACUACCCUUGACAA | | [1765-1785](21/21) 3′UTR |
| 230 | GCUUCUCCUCUGGUUUCAGGA | UCCUGAAACCAGAGGAGAAGC | | [679-699](21/21) ORF |
| 231 | GGACUAGCUUCAGGGACUUUU | AAAAGUCCCUGAAGCUAGUCC | Chimp | [643-663](21/21) ORF |
| 232 | GGUUUUUAGACAGGAAGGUAG | CUACCUUCCUGUCUAAAAACC | | [1272-1292](21/21) 3′UTR |
| 233 | CAACUUGCCAGAAUUUGGUUA | UAACCAAAUUCUGGCAAGUUG | Chimp | [358-378](21/21) ORF |
| 234 | UUCUUGGGCAUCGAUGUAGAA | UUCUACAUCGAUGCCCAAGAA | | [2417-2437](21/21) 3′UTR |
| 235 | UAACCACGGUGUUGUUUUAGA | UCUAAAACAACACCGUGGUUA | | [1443-1463](21/21) 3′UTR |
| 236 | UGGUUUCAGGUAGGCUUGGUA | UACCAAGCCUACCUGAAACCA | | [1090-1110](21/21) 3′UTR |
| 237 | CUAGCUAUUAGCUCCACUUCA | UGAAGUGGAGCUAAUAGCUAG | | [2110-2130](21/21) 3′UTR |
| 238 | ACUGAUACUAUAAGUGACCUA | UAGGUCACUUAUAGUAUCAGU | | [2201-2221](21/21) 3′UTR |
| 239 | CUUGCCAGAAUUUGGUUAAAA | UUUUAACCAAAUUCUGGCAAG | Chimp | [361-381](21/21) ORF |
| 240 | CCCACCUGCCCUAAAUAAGAA | UUCUUAUUUAGGGCAGGUGGG | | [867-887](21/21) 3′UTR |
| 241 | CAGGAAGGUAGGAUUAAGUAG | CUACUUAAUCCUACCUUCCUG | | [1282-1302](21/21) 3′UTR |
| 242 | CGGCUUGCGAGGUUGUGUUAU | AUAACACAACCUCGCAAGCCG | Chimp | [506-526](21/21) ORF |
| 243 | AAUACCUGUGAGGAUAGGAAA | UUUCCUAUCCUCACAGGUAUU | | [1589-1609](21/21) 3′UTR |
| 244 | GAUAGGAUUGUGUGUGAUUCU | AGAAUCACACACAAUCCUAUC | Chimp | [567-587](21/21) ORF |
| 245 | GACUCAAAUUUGAAGGGUUUU | AAAACCCUUCAAAUUUGAGUC | | [1257-1277](21/21) 3′UTR |
| 246 | CUUGCCUGUUAUGCUUACAAA | UUUGUAAGCAUAACAGGCAAG | | [2476-2496](21/21) 3′UTR |
| 247 | CAGCUAGUCAGCUAAAGUCAU | AUGACUUUAGCUGACUAGCUG | | [835-855](21/21) 3′UTR |
| 248 | GUACCUACUUUUGAGCUUACA | UGUAAGCUCAAAAGUAGGUAC | | [594-614](21/21) ORF |
| 249 | UCAGGAGAACUCUGAUCCUCA | UGAGGAUCAGAGUUCUCCUGA | | [694-714](21/21) ORF |
| 250 | GAGGUAAUAUUUGAGGAAUCA | UGAUUCCUCAAAUAUUACCUC | Chimp | [339-359](21/21) ORF |
| 251 | CGAGGUAAUAUUUGAGGAAUC | GAUUCCUCAAAUAUUACCUCG | Chimp | [338-358](21/21) ORF |
| 252 | CAAUAAUGGAACUGCUUCACU | AGUGAAGCAGUUCCAUUAUUG | | [1356-1376](21/21) 3′UTR |
| 253 | AAAGGUCCUUGUCCCUGAGAA | UUCUCAGGGACAAGGACCUUU | Chimp | [431-451](21/21) ORF |
| 254 | UAGCGUCGUACCUACUUUUGA | UCAAAAGUAGGUACGACGCUA | | [587-607](21/21) ORF |
| 255 | CCAGAUUUGCCUAUUUUGAUU | AAUCAAAAUAGGCAAAUCUGG | | [1125-1145](21/21) 3′UTR |
| 256 | CAGGUUUCCUGCCCUAGCUAU | AUAGCUAGGGCAGGAAACCUG | | [2097-2117](21/21) 3′UTR |
| 257 | GUUUAUAGUACAGCCUAGAGA | UCUCUAGGCUGUACUAUAAAC | | [1850-1870](21/21) 3′UTR |
| 258 | GACAGAUGUAUUCAUCCUGGU | ACCAGGAUGAAUACAUCUGUC | | [2152-2172](21/21) 3′UTR |
| 259 | GUGUUCUAACAAACUAAACUC | GAGUUUAGUUUGUUAGAACAC | | [2246-2266](21/21) 3′UTR |
| 260 | GGAAGGUAGGAUUAAGUAGGU | ACCUACUUAAUCCUACCUUCC | | [1284-1304](21/21) 3′UTR |
| 261 | AACGAGGUAAUAUUUGAGGAA | UUCCUCAAAUAUUACCUCGUU | Chimp | [336-356](21/21) ORF |
| 262 | UAGUACAGCCUAGAGAAUGAA | UUCAUUCUCUAGGCUGUACUA | | [1855-1875](21/21) 3′UTR |
| 263 | AGCUCAGGAUUUCGACUUGUU | AACAAGUCGAAAUCCUGAGCU | | [714-734](21/21) ORF |
| 264 | CAGGUAGGCUUGGUAAUAGAC | GUCUAUUACCAAGCCUACCUG | | [1096-1116](21/21) 3′UTR |
| 265 | AAGGGUCCUAAAAAGGGAAAA | UUUUCCCUUUUUAGGACCCUU | | [775-795](21/21) ORF + 3′UTR |
| 266 | AGAUCCCAUUUUUGUACAGAA | UUCUGUACAAAAAUGGGAUCU | | [1002-1022](21/21) 3′UTR |
| 267 | GCUUAAUCUCAGAUGAACCAU | AUGGUUCAUCUGAGAUUAAGC | | [1676-1696](21/21) 3′UTR |
| 268 | GGAUACCUGUCACUAGGGAAU | AUUCCCUAGUGACAGGUAUCC | | [1923-1943](21/21) 3′UTR |
| 269 | CACCAGUUCCUGACUCAAAUU | AAUUUGAGUCAGGAACUGGUG | | [1246-1266](21/21) 3′UTR |
| 270 | CUUCCAUUGAGUGAAUGAUGA | UCAUCAUUCACUCAAUGGAAG | | [1569-1589](21/21) 3′UTR |
| 271 | CUUUGAAUUAUUGAAACGGGU | ACCCGUUUCAAUAAUUCAAAG | | [1794-1814](21/21) 3′UTR |
| 272 | GCCUGCUAAGUGAUUUUGACU | AGUCAAAAUCACUUAGCAGGC | Chimp | [283-303](21/21) ORF |
| 273 | CAAAUUAGCCAGUGUUCUAAC | GUUAGAACACUGGCUAAUUUG | | [2235-2255](21/21) 3′UTR |
| 274 | CUUUGACUCUCUUGCCUGUUA | UAACAGGCAAGAGAGUCAAAG | | [2466-2486](21/21) 3′UTR |
| 275 | CAGGUGUGAUCCUGUUACUGA | UCAGUAACAGGAUCACACCUG | | [2185-2205](21/21) 3′UTR |
| 276 | AACUUUACUCACUGAUUGGAA | UUCCAAUCAGUGAGUAAAGUU | | [742-762](21/21) ORF |
| 277 | UCCUUGUCCCUGAGAAACUGA | UCAGUUUCUCAGGGACAAGGA | Dog, Chimp | [436-456](21/21) ORF |
| 278 | AAAAUGGUGAUGGCUUAUGGA | UCCAUAAGCCAUCACCAUUUU | | [2494-2514](21/21) 3′UTR |
| 279 | AAAUUAGCCAGUGUUCUAACA | UGUUAGAACACUGGCUAAUUU | | [2236-2256](21/21) 3′UTR |
| 280 | GAAUGGGAUGGAAUAGGUAAG | CUUACCUAUUCCAUCCCAUUC | | [1025-1045](21/21) 3′UTR |
| 281 | GCUUAUGGAAGGCUGUUAAAU | AUUUAACAGCCUUCCAUAAGC | | [2506-2526](21/21) 3′UTR |
| 282 | AAGGGUAGUAGCUGUAUACUA | UAGUAUACAGCUACUACCCUU | | [1770-1790](21/21) 3′UTR |
| 283 | UGAAACUCACCGUCCAGAUAA | UUAUCUGGACGGUGAGUUUCA | | [1872-1892](21/21) 3′UTR |
| 284 | CUAGCUUCAGGGACUUUUUCU | AGAAAAAGUCCCUGAAGCUAG | Chimp | [646-666](21/21) ORF |
| 285 | UACUCACUGAUUGGAACAACA | UGUUGUUCCAAUCAGUGAGUA | | [747-767](21/21) ORF |
| 286 | AAGUGAUUUUGACUACUGGGA | UCCCAGUAGUCAAAAUCACUU | Chimp | [290-310](21/21) ORF |
| 287 | GGCAAUAAUGGAACUGCUUCA | UGAAGCAGUUCCAUUAUUGCC | | [1354-1374](21/21) 3′UTR |
| 288 | GGGUAGUAAAACUAUUCAGCU | AGCUGAAUAGUUUUACUACCC | | [819-839](21/21) 3′UTR |
| 289 | CUGCAUAGAUCCCAUUUUUGU | ACAAAAAUGGGAUCUAUGCAG | | [996-1016](21/21) 3′UTR |
| 290 | GUUUUAAAGAGGCAACAAAAG | CUUUUGUUGCCUCUUUAAAAC | | [1404-1424](21/21) 3′UTR |
| 291 | GAACCCAACCUCAACGAGGUA | UACCUCGUUGAGGUUGGGUUC | Chimp | [324-344](21/21) ORF |
| 292 | AGCUAUUAGCUCCACUUCACA | UGUGAAGUGGAGCUAAUAGCU | | [2112-2132](21/21) 3′UTR |
| 293 | CUUUCUGUGUUUCACAUUCAU | AUGAAUGUGAAACACAGAAAG | | [909-929](21/21) 3′UTR |
| 294 | CAGAAUUGCUGGACUGUGGCU | AGCCACAGUCCAGCAAUUCUG | Chimp | [250-270](21/21) ORF |
| 295 | CAAACUAAACUUGGUUGCUCA | UGAGCAACCAAGUUUAGUUUG | Chimp | [411-431](21/21) ORF |
| 296 | CUUCUUGGGCAUCGAUGUAGA | UCUACAUCGAUGCCCAAGAAG | | [2416-2436](21/21) 3′UTR |
| 297 | GUCAAGGGUAGUAGCUGUAUA | UAUACAGCUACUACCCUUGAC | | [1767-1787](21/21) 3′UTR |
| 298 | UCAGGUUUCCUGCCCUAGCUA | UAGCUAGGGCAGGAAACCUGA | | [2096-2116](21/21) 3′UTR |
| 299 | CGAUGUAGAACUGUUGUCCUU | AAGGACAACAGUUCUACAUCG | | [2428-2448](21/21) 3′UTR |
| 300 | UGGGCAUCGAUGUAGAACUGU | ACAGUUCUACAUCGAUGCCCA | | [2421-2441](21/21) 3′UTR |
| 301 | GGUAGUAGCUGUAUACUACCA | UGGUAGUAUACAGCUACUACC | | [1773-1793](21/21) 3′UTR |
| 302 | CUCUUUUCUUUCUGUGUUUCA | UGAAACACAGAAAGAAAAGAG | | [902-922](21/21) 3′UTR |
| 303 | CUGGAGAACUGUCUGUCCAAA | UUUGGACAGACAGUUCUCCAG | Dog, Chimp | [384-404](21/21) ORF |
| 304 | UUGUCACCACUGACUGGGCAA | UUGCCCAGUCAGUGGUGACAA | | [2393-2413](21/21) 3′UTR |
| 305 | CCAAAUCAAAGCAAACUAAAC | GUUUAGUUUGCUUUGAUUUGG | Chimp | [400-420](21/21) ORF |
| 306 | GCUUGGAAAGAUACUACAAAG | CUUUGUAGUAUCUUUCCAAGC | | [2274-2294](21/21) 3′UTR |
| 307 | GGCAGUGUUAUCUCAUCUCUG | CAGAGAUGAGAUAACACUGCC | | [1705-1725](21/21) 3′UTR |
| 308 | ACAGAAUUGAAUGGGAUGGAA | UUCCAUCCCAUUCAAUUCUGU | | [1017-1037](21/21) 3′UTR |
| 309 | CACUGAUUGGAACAACAGUGA | UCACUGUUGUUCCAAUCAGUG | | [751-771](21/21) ORF |
| 310 | GCUUAACCCUAGGUAAGAGUA | UACUCUUACCUAGGGUUAAGC | | [1318-1338](21/21) 3′UTR |
| 311 | UCUUGCCUGUUAUGCUUACAA | UUGUAAGCAUAACAGGCAAGA | | [2475-2495](21/21) 3′UTR |
| 312 | CACUAACAGUUAUCUUUGACU | AGUCAAAGAUAACUGUUAGUG | | [2453-2473](21/21) 3′UTR |
| 313 | GAGAGCCUGCUAAGUGAUUUU | AAAAUCACUUAGCAGGCUCUC | Chimp | [279-299](21/21) ORF |
| 314 | ACACCACCAGUUCCUGACUCA | UGAGUCAGGAACUGGUGGUGU | | [1242-1262](21/21) 3′UTR |
| 315 | GAUUAUUUCAUGAUUGGGUAG | CUACCCAAUCAUGAAAUAAUC | | [804-824](21/21) 3′UTR |
| 316 | AUGCUUGGAAAGAUACUACAA | UUGUAGUAUCUUUCCAAGCAU | | [2272-2292](21/21) 3′UTR |
| 317 | UGCAUAGAUCCCAUUUUUGUA | UACAAAAAUGGGAUCUAUGCA | | [997-1017](21/21) 3′UTR |
| 318 | UAGGCUUGGUAAUAGACUAUA | UAUAGUCUAUUACCAAGCCUA | | [1100-1120](21/21) 3′UTR |
| 319 | UGAUUUUGACUACUGGGAUUA | UAAUCCCAGUAGUCAAAAUCA | Dog, Chimp | [293-313](21/21) ORF |
| 320 | UGGUUUAUAGUACAGCCUAGA | UCUAGGCUGUACUAUAAACCA | | [1848-1868](21/21) 3′UTR |
| 321 | CUGCAUUGGCUAUGGAGAUAU | AUAUCUCCAUAGCCAAUGCAG | | [1828-1848](21/21) 3′UTR |
| 322 | UUAUAGAAUUGGGCCAAGAUA | UAUCUUGGCCCAAUUCUAUAA | | [2302-2322](21/21) 3′UTR |
| 323 | GAUACUACAAAGCCAAUCUUU | AAAGAUUGGCUUUGUAGUAUC | | [2283-2303](21/21) 3′UTR |
| 324 | CAGCAAGGCUUUCAUAUCCUU | AAGGAUAUGAAAGCCUUGCUG | | [2048-2068](21/21) 3′UTR |
| 325 | GAAUUGCUGGACUGUGGCUAU | AUAGCCACAGUCCAGCAAUUC | Chimp | [252-272](21/21) ORF |
| 326 | CAGGAUUUCGACUUGUUAAGA | UCUUAACAAGUCGAAAUCCUG | | [718-738](21/21) ORF |
| 327 | GGUCCUUGUCCCUGAGAAACU | AGUUUCUCAGGGACAAGGACC | Chimp | [434-454](21/21) ORF |
| 328 | UGGUGUUACUGAAAAACAGGU | ACCUGUUUUUCAGUAACACCA | | [2169-2189](21/21) 3′UTR |
| 329 | AGUGAAUGAUGAAUACCUGUG | CACAGGUAUUCAUCAUUCACU | | [1578-1598](21/21) 3′UTR |
| 330 | CAGUUAUCUUUGACUCUCUUG | CAAGAGAGUCAAAGAUAACUG | | [2459-2479](21/21) 3′UTR |
| 331 | ACGGCAAUAAUGGAACUGCUU | AAGCAGUUCCAUUAUUGCCGU | | [1352-1372](21/21) 3′UTR |
| 332 | AUUUGAGGAAUCAACUUGCCA | UGGCAAGUUGAUUCCUCAAAU | Chimp | [347-367](21/21) ORF |
| 333 | CCAACCUCAACGAGGUAAUAU | AUAUUACCUCGUUGAGGUUGG | Chimp | [328-348](21/21) ORF |
| 334 | CCCUGUUCUUAAGUGUUGAAU | AUUCAACACUUAAGAACAGGG | | [1485-1505](21/21) 3′UTR |
| 335 | GAACCAUUUCACCAUGGCAGU | ACUGCCAUGGUGAAAUGGUUC | | [1690-1710](21/21) 3′UTR |
| 336 | CAGCCUAGAGAAUGAAACUCA | UGAGUUUCAUUCUCUAGGCUG | | [1860-1880](21/21) 3′UTR |
| 337 | AGCCUAUCAAAACUUCCAAAA | UUUUGGAAGUUUUGAUAGGCU | | [1217-1237](21/21) 3′UTR |
| 338 | CUUGCGAGGUUGUGUUAUGCA | UGCAUAACACAACCUCGCAAG | Chimp | [509-529](21/21) ORF |
| 339 | UAGAAGCCCAUUUGAGUUUUA | UAAAACUCAAAUGGGCUUCUA | | [1052-1072](21/21) 3′UTR |
| 340 | ACCUGUCACUAGGGAAUAAUA | UAUUAUUCCCUAGUGACAGGU | | [1927-1947](21/21) 3′UTR |
| 341 | AGUCAGCUAAAGUCAUUUGUA | UACAAAUGACUUUAGCUGACU | | [840-860](21/21) 3′UTR |
| 342 | CAGUAUUACAUGUGCUUAAUC | GAUUAAGCACAUGUAAUACUG | | [1663-1683](21/21) 3′UTR |
| 343 | CACCCAGAUUUUUUCCACCUU | AAGGUGGAAAAAAUCUGGGUG | | [1902-1922](21/21) 3′UTR |
| 344 | CUUACAAAAUGGUGAUGGCUU | AAGCCAUCACCAUUUUGUAAG | | [2489-2509](21/21) 3′UTR |
| 345 | UUUGGUUAAAAUGCUGGAGAA | UUCUCCAGCAUUUUAACCAAA | Chimp | [371-391](21/21) ORF |
| 346 | GAUUACUCUUCCAUUGAGUGA | UCACUCAAUGGAAGAGUAAUC | | [1562-1582](21/21) 3′UTR |
| 347 | CAUGUCUAUUGUUAAGCUCCA | UGGAGCUUAACAAUAGACAUG | | [2339-2359](21/21) 3′UTR |
| 348 | GCGUAGGGACAGAUGUAUUCA | UGAAUACAUCUGUCCCUACGC | | [2145-2165](21/21) 3′UTR |
| 349 | AGCCGUUGACCAUGGUUGCAA | UUGCAACCAUGGUCAACGGCU | Chimp, Rat, Ms | [193-213](21/21) 5′UTR + ORF |
| 350 | UUACAUGUGCUUAAUCUCAGA | UCUGAGAUUAAGCACAUGUAA | | [1668-1688](21/21) 3′UTR |
| 351 | AUCUCUGGGCUUUUCUGGGAA | UUCCCAGAAAAGCCCAGAGAU | | [1719-1739](21/21) 3′UTR |
| 352 | CCUUGUCCCUGAGAAACUGAC | GUCAGUUUCUCAGGGACAAGG | Dog, Chimp | [437-457](21/21) ORF |
| 353 | UAGAAUUGGGCCAAGAUAAAU | AUUUAUCUUGGCCCAAUUCUA | | [2305-2325](21/21) 3′UTR |
| 354 | AGGGACUUUUUCUUUAGUAGA | UCUACUAAAGAAAAAGUCCCU | | [654-674](21/21) ORF |
| 355 | UUGAGUGAAUGAUGAAUACCU | AGGUAUUCAUCAUUCACUCAA | | [1575-1595](21/21) 3′UTR |
| 356 | GCAUCGAUGUAGAACUGUUGU | ACAACAGUUCUACAUCGAUGC | | [2424-2444](21/21) 3′UTR |
| 357 | UUGAAACGGGUCAAUUUACGA | UCGUAAAUUGACCCGUUUCAA | | [1804-1824](21/21) 3′UTR |
| 358 | AAGUCUGCAUUGGCUAUGGAG | CUCCAUAGCCAAUGCAGACUU | | [1824-1844](21/21) 3′UTR |
| 359 | AUGUCUAUUGUUAAGCUCCAA | UUGGAGCUUAACAAUAGACAU | | [2340-2360](21/21) 3′UTR |
| 360 | AUUGGGCCAAGAUAAAUCAAU | AUUGAUUUAUCUUGGCCCAAU | | [2309-2329](21/21) 3′UTR |
| 361 | UGCUUAAUCUCAGAUGAACCA | UGGUUCAUCUGAGAUUAAGCA | | [1675-1695](21/21) 3′UTR |
| 362 | CAGCUAAAGUCAUUUGUAGUU | AACUACAAAUGACUUUAGCUG | | [843-863](21/21) 3′UTR |
| 363 | GAGAAUUGCUCAAGAUGUCCU | AGGACAUCUUGAGCAAUUCUC | Chimp, Ms | [461-481](21/21) ORF |
| 364 | GGCUAUGGAGAUAUGGUUUAU | AUAAACCAUAUCUCCAUAGCC | | [1835-1855](21/21) 3′UTR |
| 365 | GCCCUAGCUAUUAGCUCCACU | AGUGGAGCUAAUAGCUAGGGC | | [2107-2127](21/21) 3′UTR |
| 366 | CAGCAUUUCAGAAUUGCUGGA | UCCAGCAAUUCUGAAAUGCUG | Chimp | [242-262](21/21) ORF |
| 367 | CCUACUUUUGAGCUUACACUU | AAGUGUAAGCUCAAAAGUAGG | Chimp | [597-617](21/21) ORF |
| 368 | CCAGAGAAUUGCUCAAGAUGU | ACAUCUUGAGCAAUUCUCUGG | Chimp, Ms | [458-478](21/21) ORF |
| 369 | AGGUAGGCUUGGUAAUAGACU | AGUCUAUUACCAAGCCUACCU | | [1097-1117](21/21) 3′UTR |
| 370 | GAUUUUGACUACUGGGAUUAU | AUAAUCCCAGUAGUCAAAAUC | Chimp | [294-314](21/21) ORF |
| 371 | AUGAUGAAUACCUGUGAGGAU | AUCCUCACAGGUAUUCAUCAU | | [1583-1603](21/21) 3′UTR |
| 372 | GCUCCAAAGGUUCACUGUGUU | AACACAGUGAACCUUUGGAGC | | [2354-2374](21/21) 3′UTR |
| 373 | UGAUCCUGUUACUGAUACUAU | AUAGUAUCAGUAACAGGAUCA | | [2191-2211](21/21) 3′UTR |
| 374 | GUCAAUUUACGAAGUCUGCAU | AUGCAGACUUCGUAAAUUGAC | | [1813-1833](21/21) 3′UTR |
| 375 | GGAAACAGAGCCGUUGACCAU | AUGGUCAACGGCUCUGUUUCC | Dog, Chimp, Rat, Ms | [185-205](21/21) 5′UTR + ORF |
| 376 | GAAAAACAGGUGUGAUCCUGU | ACAGGAUCACACCUGUUUUUC | | [2179-2199](21/21) 3′UTR |
| 377 | UCAGGGACUUUUUCUUUAGUA | UACUAAAGAAAAAGUCCCUGA | | [652-672](21/21) ORF |
| 378 | UCAUGAUUGGGUAGUAAAACU | AGUUUUACUACCCAAUCAUGA | | [811-831](21/21) 3′UTR |
| 379 | CAUGGACUAGCUUCAGGGACU | AGUCCCUGAAGCUAGUCCAUG | Chimp | [640-660](21/21) ORF |
| 380 | GCGAGGUUGUGUUAUGCACGU | ACGUGCAUAACACAACCUCGC | | [512-532](21/21) ORF |
| 381 | AACCCAACCUCAACGAGGUAA | UUACCUCGUUGAGGUUGGGUU | Chimp | [325-345](21/21) ORF |
| 382 | GAGAUAUGGUUUAUAGUACAG | CUGUACUAUAAACCAUAUCUC | | [1842-1862](21/21) 3′UTR |
| 383 | AGGUGUGAUCCUGUUACUGAU | AUCAGUAACAGGAUCACACCU | | [2186-2206](21/21) 3′UTR |
| 384 | GAGAAACUGACCCAGAGAAUU | AAUUCUCUGGGUCAGUUUCUC | Chin, GP, Chimp, Rat, Ms | [447-467](21/21) ORF |
| 385 | AGAUUUUCUGCAUAGAUCCCA | UGGGAUCUAUGCAGAAAAUCU | | [989-1009](21/21) 3′UTR |
| 386 | AGGAAUCAACUUGCCAGAAUU | AAUUCUGGCAAGUUGAUUCCU | Chimp | [352-372](21/21) ORF |
| 387 | CCAUGCAUGCACCCAGAUUUU | AAAAUCUGGGUGCAUGCAUGG | | [1893-1913](21/21) 3′UTR |
| 388 | ACUGUUGUCCUUUUUCCACUA | UAGUGGAAAAAGGACAACAGU | | [2437-2457](21/21) 3′UTR |
| 389 | UAACCCUAGGUAAGAGUAAAU | AUUUACUCUUACCUAGGGUUA | | [1321-1341](21/21) 3′UTR |
| 390 | AUUCAUCCUGGUGUUACUGAA | UUCAGUAACACCAGGAUGAAU | | [2161-2181](21/21) 3′UTR |
| 391 | AGGGAAUAAUAAAGGCCUUAU | AUAAGGCCUUUAUUAUUCCCU | | [1937-1957](21/21) 3′UTR |
| 392 | UUGUUAAGCUCCAAAGGUUCA | UGAACCUUUGGAGCUUAACAA | | [2347-2367](21/21) 3′UTR |
| 393 | CUGGUUUCAGGAGAACUCUGA | UCAGAGUUCUCCUGAAACCAG | | [688-708](21/21) ORF |
| 394 | UGGAAAGAUACUACAAAGCCA | UGGCUUUGUAGUAUCUUUCCA | | [2277-2297](21/21) 3′UTR |
| 395 | CUCUGAUCCUCAGCUCAGGAU | AUCCUGAGCUGAGGAUCAGAG | | [703-723](21/21) ORF |
| 396 | CAACUGGCAGUUUGAGCAGCA | UGCUGCUCAAACUGCCAGUUG | Chimp | [211-231](21/21) ORF |
| 397 | UAAGCAAAAGUAGAAGCCCAU | AUGGGCUUCUACUUUUGCUUA | | [1042-1062](21/21) 3′UTR |
| 398 | GAUUUUCUGCAUAGAUCCCAU | AUGGGAUCUAUGCAGAAAAUC | | [990-1010](21/21) 3′UTR |
| 399 | GAGUUUUACAUUUGAUUCCAC | GUGGAAUCAAAUGUAAAACUC | | [1065-1085](21/21) 3′UTR |
| 400 | CUGCCCUAGCUAUUAGCUCCA | UGGAGCUAAUAGCUAGGGCAG | | [2105-2125](21/21) 3′UTR |
| 401 | UCCACUAACAGUUAUCUUUGA | UCAAAGAUAACUGUUAGUGGA | | [2451-2471](21/21) 3′UTR |
| 402 | AGGCUUGGUAAUAGACUAUAU | AUAUAGUCUAUUACCAAGCCU | | [1101-1121](21/21) 3′UTR |
| 403 | AAAGCUUGUGGUGCCAUUUCA | UGAAAUGGCACCACAAGCUUU | | [1421-1441](21/21) 3′UTR |
| 404 | UAGCCUAUCAAAACUUCCAAA | UUUGGAAGUUUUGAUAGGCUA | | [1216-1236](21/21) 3′UTR |
| 405 | GUCUUAUUCCAACUAAGUAGA | UCUACUUAGUUGGAAUAAGAC | | [1963-1983](21/21) 3′UTR |
| 406 | UCAGCUAAAGUCAUUUGUAGU | ACUACAAAUGACUUUAGCUGA | | [842-862](21/21) 3′UTR |
| 407 | CAACUGCAGCUAACAGGCUGA | UCAGCCUGUUAGCUGCAGUUG | | [932-952](21/21) 3′UTR |
| 408 | CGUCGUACCUACUUUUGAGCU | AGCUCAAAAGUAGGUACGACG | | [590-610](21/21) ORF |
| 409 | CAACAGUGAUUGAAGGGUCCU | AGGACCCUUCAAUCACUGUUG | | [763-783](21/21) ORF |
| 410 | GGAACUGCUUCACUGUUUCUU | AAGAAACAGUGAAGCAGUUCC | | [1363-1383](21/21) 3′UTR |
| 411 | CCCAGAUUUUUUCCACCUUGG | CCAAGGUGGAAAAAAUCUGGG | | [1904-1924](21/21) 3′UTR |
| 412 | CUUAAUCUCAGAUGAACCAUU | AAUGGUUCAUCUGAGAUUAAG | | [1677-1697](21/21) 3′UTR |
| 413 | AAAACAGGUGUGAUCCUGUUA | UAACAGGAUCACACCUGUUUU | | [2181-2201](21/21) 3′UTR |
| 414 | UGAGAUCUAGUCCCUCUCUGA | UCAGAGAGGGACUAGAUCUCA | | [1617-1637](21/21) 3′UTR |
| 415 | CAAAGCAAACUAAACUUGGUU | AACCAAGUUUAGUUUGCUUUG | Chimp | [406-426](21/21) ORF |
| 416 | UGGCAGUUUGAGCAGCAAGAA | UUCUUGCUGCUCAAACUGCCA | Chimp | [215-235](21/21) ORF |
| 417 | UGUUUCUUGGUGACUUCCUCA | UGAGGAAGUCACCAAGAAACA | | [1376-1396](21/21) 3′UTR |
| 418 | UUCAAAUUAGCCAGUGUUCUA | UAGAACACUGGCUAAUUUGAA | | [2233-2253](21/21) 3′UTR |
| 419 | ACUGCUUCACUGUUUCUUGGU | ACCAAGAAACAGUGAAGCAGU | | [1366-1386](21/21) 3′UTR |
| 420 | GACCCAGAGAAUUGCUCAAGA | UCUUGAGCAAUUCUCUGGGUC | Chimp, Ms | [455-475](21/21) ORF |
| 421 | GAAUUGAAGUAUCUCUCCUUA | UAAGGAGAGAUACUUCAAUUC | | [1737-1757](21/21) 3′UTR |
| 422 | AUCUAGUCCCUCUCUGAUUCA | UGAAUCAGAGAGGGACUAGAU | | [1621-1641](21/21) 3′UTR |
| 423 | UCAAAUGCUUGGAAAGAUACU | AGUAUCUUUCCAAGCAUUUGA | | [2268-2288](21/21) 3′UTR |
| 424 | CAAUUGUCAAGGGUAGUAGCU | AGCUACUACCCUUGACAAUUG | | [1762-1782](21/21) 3′UTR |
| 425 | CUGACUCAAAUUUGAAGGGUU | AACCCUUCAAAUUUGAGUCAG | | [1255-1275](21/21) 3′UTR |
| 426 | UUACAAAAUGGUGAUGGCUUA | UAAGCCAUCACCAUUUUGUAA | | [2490-2510](21/21) 3′UTR |
| 427 | UCUCUGGGCUUUUCUGGGAAU | AUUCCCAGAAAAGCCCAGAGA | | [1720-1740](21/21) 3′UTR |
| 428 | CAAAAGCCCACACCACCAGUU | AACUGGUGGUGUGGGCUUUUG | | [1233-1253](21/21) 3′UTR |
| 429 | UAGGAUUGUGUGUGAUUCUAG | CUAGAAUCACACACAAUCCUA | Chimp | [569-589](21/21) ORF |
| 430 | CAAAUGCUUGGAAAGAUACUA | UAGUAUCUUUCCAAGCAUUUG | | [2269-2289](21/21) 3′UTR |
| 431 | CCUGUUACUGAUACUAUAAGU | ACUUAUAGUAUCAGUAACAGG | | [2195-2215](21/21) 3′UTR |
| 432 | GCACCCAGAUUUUUUCCACCU | AGGUGGAAAAAAUCUGGGUGC | | [1901-1921](21/21) 3′UTR |
| 433 | CUCUAAUGUUUUAAAGAGGCA | UGCCUCUUUAAAACAUUAGAG | | [1397-1417](21/21) 3′UTR |
| 434 | CAGUUCCUGACUCAAAUUUGA | UCAAAUUUGAGUCAGGAACUG | | [1249-1269](21/21) 3′UTR |
| 435 | GUCUCUUUUCUUUCUGUGUUU | AAACACAGAAAGAAAAGAGAC | | [900-920](21/21) 3′UTR |
| 436 | UAGUGUAGAUUUUCUGCAUAG | CUAUGCAGAAAAUCUACACUA | | [983-1003](21/21) 3′UTR |
| 437 | GGUAGGAUUAAGUAGGUGAGU | ACUCACCUACUUAAUCCUACC | | [1288-1308](21/21) 3′UTR |
| 438 | GUGAUUCUAGCGUCGUACCUA | UAGGUACGACGCUAGAAUCAC | | [580-600](21/21) ORF |
| 439 | GGUUAAAAUGCUGGAGAACUG | CAGUUCUCCAGCAUUUUAACC | Chimp | [374-394](21/21) ORF |
| 440 | CUCAGAUGAACCAUUUCACCA | UGGUGAAAUGGUUCAUCUGAG | | [1683-1703](21/21) 3′UTR |
| 441 | UGAGAAACUGACCCAGAGAAU | AUUCUCUGGGUCAGUUUCUCA | Chin, GP, Chimp, Rat, Ms | [446-466](21/21) ORF |
| 442 | ACUUGGUUGCUCAAAGGUCCU | AGGACCUUUGAGCAACCAAGU | Chimp | [419-439](21/21) ORF |
| 443 | UAGGAUUAAGUAGGUGAGUUU | AAACUCACCUACUUAAUCCUA | | [1290-1310](21/21) 3′UTR |
| 444 | AGGAUUAAGUAGGUGAGUUUA | UAAACUCACCUACUUAAUCCU | | [1291-1311](21/21) 3′UTR |
| 445 | UCCUUUUUCCACUAACAGUUA | UAACUGUUAGUGGAAAAAGGA | | [2444-2464](21/21) 3′UTR |
| 446 | GAAGCCACCUGCCUGUGUUUA | UAAACACAGGCAGGUGGCUUC | | [94-114](21/21) 5′UTR |
| 447 | GCUUCUUGGGCAUCGAUGUAG | CUACAUCGAUGCCCAAGAAGC | | [2415-2435](21/21) 3′UTR |
| 448 | CUGUCUGUCCAAAUCAAAGCA | UGCUUUGAUUUGGACAGACAG | Dog, Chimp | [392-412](21/21) ORF |
| 449 | CUGGAUAGGAUUGUGUGUGAU | AUCACACACAAUCCUAUCCAG | Chin, GP, Chimp, Rat | [564-584](21/21) ORF |
| 450 | CUGGGCUUUUCUGGGAAUUGA | UCAAUUCCCAGAAAAGCCCAG | | [1723-1743](21/21) 3′UTR |
| 451 | CUAACAGUUAUCUUUGACUCU | AGAGUCAAAGAUAACUGUUAG | | [2455-2475](21/21) 3′UTR |
| 452 | AUGUAAAAAGCUGGAUAGGAU | AUCCUAUCCAGCUUUUUACAU | Chimp, Ms | [554-574](21/21) ORF |
| 453 | UCUCCUCUGGUUUCAGGAGAA | UUCUCCUGAAACCAGAGGAGA | | [682-702](21/21) ORF |
| 454 | GAUUUUUUCCACCUUGGAUAC | GUAUCCAAGGUGGAAAAAAUC | | [1908-1928](21/21) 3′UTR |
| 455 | AACUCACCGUCCAGAUAACCA | UGGUUAUCUGGACGGUGAGUU | | [1875-1895](21/21) 3′UTR |
| 456 | AGUGAUUUUGACUACUGGGAU | AUCCCAGUAGUCAAAAUCACU | Chimp | [291-311](21/21) ORF |
| 457 | AUGGAAUAGGUAAGCAAAAGU | ACUUUUGCUUACCUAUUCCAU | | [1032-1052](21/21) 3′UTR |
| 458 | GAUGGAAUAGGUAAGCAAAAG | CUUUUGCUUACCUAUUCCAUC | | [1031-1051](21/21) 3′UTR |
| 459 | GGUUUAUAGUACAGCCUAGAG | CUCUAGGCUGUACUAUAAACC | | [1849-1869](21/21) 3′UTR |
| 460 | GAUUGUGUGUGAUUCUAGCGU | ACGCUAGAAUCACACACAAUC | | [572-592](21/21) ORF |
| 461 | CGGCAAUAAUGGAACUGCUUC | GAAGCAGUUCCAUUAUUGCCG | | [1353-1373](21/21) 3′UTR |
| 462 | CUCCAAAGGUUCACUGUGUUU | AAACACAGUGAACCUUUGGAG | | [2355-2375](21/21) 3′UTR |
| 463 | AGAAGCCACCUGCCUGUGUUU | AAACACAGGCAGGUGGCUUCU | | [93-113](21/21) 5′UTR |
| 464 | UGUCAAGGGUAGUAGCUGUAU | AUACAGCUACUACCCUUGACA | | [1766-1786](21/21) 3′UTR |
| 465 | CAUUGAGUGAAUGAUGAAUAC | GUAUUCAUCAUUCACUCAAUG | | [1573-1593](21/21) 3′UTR |
| 466 | AGGUUUCCUGCCCUAGCUAUU | AAUAGCUAGGGCAGGAAACCU | | [2098-2118](21/21) 3′UTR |
| 467 | UCCUGAACCCAACCUCAACGA | UCGUUGAGGUUGGGUUCAGGA | Chimp | [320-340](21/21) ORF |
| 468 | AGUAGAAGCCCAUUUGAGUUU | AAACUCAAAUGGGCUUCUACU | | [1050-1070](21/21) 3′UTR |
| 469 | GCCUCCACUCAACAAUGUUCA | UGAACAUUGUUGAGUGGAGGC | | [2024-2044](21/21) 3′UTR |
| 470 | GUUAAAAUGCUGGAGAACUGU | ACAGUUCUCCAGCAUUUUAAC | Chimp | [375-395](21/21) ORF |
| 471 | AUACCUGUGAGGAUAGGAAAU | AUUUCCUAUCCUCACAGGUAU | | [1590-1610](21/21) 3′UTR |
| 472 | UGUACAGAAUUGAAUGGGAUG | CAUCCCAUUCAAUUCUGUACA | | [1014-1034](21/21) 3′UTR |
| 473 | CAGUGUUAUCUCAUCUCUGGG | CCCAGAGAUGAGAUAACACUG | | [1707-1727](21/21) 3′UTR |
| 474 | UGGACUAGCUUCAGGGACUUU | AAAGUCCCUGAAGCUAGUCCA | Chimp | [642-662](21/21) ORF |
| 475 | UGUGAGGAUAGGAAAUUAGUU | AACUAAUUUCCUAUCCUCACA | | [1595-1615](21/21) 3′UTR |
| 476 | GAGGCAACAAAAGCUUGUGGU | ACCACAAGCUUUUGUUGCCUC | | [1412-1432](21/21) 3′UTR |
| 477 | UCUGGCCUUUGGAGAAGUGAU | AUCACUUCUCCAAAGGCCAGA | | [956-976](21/21) 3′UTR |
| 478 | CAUCUCUGGGCUUUUCUGGGA | UCCCAGAAAAGCCCAGAGAUG | | [1718-1738](21/21) 3′UTR |
| 479 | GAGAAUGAAACUCACCGUCCA | UGGACGGUGAGUUUCAUUCUC | | [1867-1887](21/21) 3′UTR |
| 480 | UUUAUAGUACAGCCUAGAGAA | UUCUCUAGGCUGUACUAUAAA | | [1851-1871](21/21) 3′UTR |
| 481 | AGAACUGUUGUCCUUUUUCCA | UGGAAAAAGGACAACAGUUCU | | [2434-2454](21/21) 3′UTR |
| 482 | AACUAAACUUGGUUGCUCAAA | UUUGAGCAACCAAGUUUAGUU | Chimp | [413-433](21/21) ORF |
| 483 | GUGACUUCCUCACUCUAAUGU | ACAUUAGAGUGAGGAAGUCAC | | [1385-1405](21/21) 3′UTR |
| 484 | ACAAAAGCUUGUGGUGCCAUU | AAUGGCACCACAAGCUUUUGU | | [1418-1438](21/21) 3′UTR |
| 485 | CUGACCCAGAGAAUUGCUCAA | UUGAGCAAUUCUCUGGGUCAG | Chimp, Ms | [453-473](21/21) ORF |
| 486 | UCAGGAUUUCGACUUGUUAAG | CUUAACAAGUCGAAAUCCUGA | | [717-737](21/21) ORF |
| 487 | ACUCUUCCAUUGAGUGAAUGA | UCAUUCACUCAAUGGAAGAGU | | [1566-1586](21/21) 3′UTR |
| 488 | GCUAAAGUCAUUUGUAGUUUG | CAAACUACAAAUGACUUUAGC | | [845-865](21/21) 3′UTR |
| 489 | CAUUGGCUAUGGAGAUAUGGU | ACCAUAUCUCCAUAGCCAAUG | | [1831-1851](21/21) 3′UTR |
| 490 | GAACUGCUCAUGGACUAGCUU | AAGCUAGUCCAUGAGCAGUUC | Dog, Chimp | [632-652](21/21) ORF |
| 491 | CUUGGUUGCUCAAAGGUCCUU | AAGGACCUUUGAGCAACCAAG | Chimp | [420-440](21/21) ORF |
| 492 | GAUACCUGUCACUAGGGAAUA | UAUUCCCUAGUGACAGGUAUC | | [1924-1944](21/21) 3′UTR |
| 493 | AAGGUCCUUGUCCCUGAGAAA | UUUCUCAGGGACAAGGACCUU | Chimp | [432-452](21/21) ORF |
| 494 | GGCAGUUUGAGCAGCAAGAAC | GUUCUUGCUGCUCAAACUGCC | Chimp | [216-236](21/21) ORF |
| 495 | CUGGCCUUUGGAGAAGUGAUU | AAUCACUUCUCCAAAGGCCAG | | [957-977](21/21) 3′UTR |
| 496 | AUUGGAACAACAGUGAUUGAA | UUCAAUCACUGUUGUUCCAAU | | [756-776](21/21) ORF |
| 497 | GAUGUAUUCAUCCUGGUGUUA | UAACACCAGGAUGAAUACAUC | | [2156-2176](21/21) 3′UTR |
| 498 | CCGUUGACCAUGGUUGCAACU | AGUUGCAACCAUGGUCAACGG | Chimp | [195-215](21/21) 5′UTR + ORF |
| 499 | CUAUAUAAACCAGAUUUGCCU | AGGCAAAUCUGGUUUAUAUAG | | [1116-1136](21/21) 3′UTR |
| 500 | GAUGUAGAACUGUUGUCCUUU | AAAGGACAACAGUUCUACAUC | | [2429-2449](21/21) 3′UTR |

TABLE D
23 mers

| | | | | |
|---|---|---|---|---|
| Number | Sense siRNA | AntiSense siRNA | Other Sp | Hum-34222182 ORF: 204-785 |

| | | | | |
|---|---|---|---|---|
| 1 | GAGUUUUACAUUUGAUUCCACAA | UUGUGGAAUCAAAUGUAAAACUC | | [1065-1087](23/23) 3′UTR |
| 2 | GGUAAUAGACUAUAUAAACCAGA | UCUGGUUUAUAUAGUCUAUUACC | | [1107-1129](23/23) 3′UTR |
| 3 | GGGAAUUGAAGUAUCUCUCCUUA | UAAGGAGAGAUACUUCAAUUCCC | | [1735-1757](23/23) 3′UTR |
| 4 | GAAAAUGUAUGUAAAAAGCUGGA | UCCAGCUUUUUACAUACAUUUUC | Chimp, Ms | [546-568](23/23) ORF |
| 5 | CAGAGGAUUUUUUAAAUCACAGA | UCUGUGAUUUAAAAAAUCCUCUG | | [1175-1197](23/23) 3′UTR |
| 6 | GGCUGUUAAAUUAAUAUUCCUGU | ACAGGAAUAUUAAUUUAACAGCC | | [2516-2538](23/23) 3′UTR |
| 7 | GCCUUAUUUUUUGUCUUAUUCCA | UGGAAUAAGACAAAAAAUAAGGC | | [1951-1973](23/23) 3′UTR |
| 8 | CAAAUUUGAAGGGUUUUUAGACA | UGUCUAAAAACCCUUCAAAUUUG | | [1261-1283](23/23) 3′UTR |
| 9 | CUAAGUGAUUUUGACUACUGGGA | UCCCAGUAGUCAAAAUCACUUAG | Chimp | [288-310](23/23) ORF |
| 10 | CUAUCACCCAGAGAGCCUGCUAA | UUAGCAGGCUCUCUGGGUGAUAG | Chimp | [269-291](23/23) ORF |
| 11 | AGAUGUCCUGCGGCUUUCCUCAA | UUGAGGAAAGCCGCAGGACAUCU | Chimp | [473-495](23/23) ORF |
| 12 | AACUAUUCAGCUAGUCAGCUAAA | UUUAGCUGACUAGCUGAAUAGUU | | [828-850](23/23) 3′UTR |
| 13 | GUUGUUUUGCAUGUCUAUUGUUA | UAACAAUAGACAUGCAAAACAAC | | [2330-2352](23/23) 3′UTR |
| 14 | UGAGUUUUACAUUUGAUUCCACA | UGUGGAAUCAAAUGUAAAACUCA | | [1064-1086](23/23) 3′UTR |
| 15 | GGUAGUAAAACUAUUCAGCUAGU | ACUAGCUGAAUAGUUUUACUACC | | [820-842](23/23) 3′UTR |
| 16 | AGUAUUACAUGUGCUUAAUCUCA | UGAGAUUAAGCACAUGUAAUACU | | [1664-1686](23/23) 3′UTR |
| 17 | CUGUUAUGCUUACAAAAUGGUGA | UCACCAUUUUGUAAGCAUAACAG | | [2481-2503](23/23) 3′UTR |
| 18 | UCUCUUGCCUGUUAUGCUUACAA | UUGUAAGCAUAACAGGCAAGAGA | | [2473-2495](23/23) 3′UTR |
| 19 | CCAUUUCACCAUGGCAGUGUUAU | AUAACACUGCCAUGGUGAAAUGG | | [1693-1715](23/23) 3′UTR |
| 20 | UGAUCCUCAGCUCAGGAUUUCGA | UCGAAAUCCUGAGCUGAGGAUCA | | [706-728](23/23) ORF |
| 21 | CAAAAUAGUGUAGAUUUUCUGCA | UGCAGAAAAUCUACACUAUUUUG | | [978-1000](23/23) 3′UTR |
| 22 | GGUUAAAAUGCUGGAGAACUGUC | GACAGUUCUCCAGCAUUUUAACC | Chimp | [374-396](23/23) ORF |
| 23 | CUGAUAUUUUUGUGUGUAGUUGA | UCAACUACACACAAAAAUAUCAG | | [1541-1563](23/23) 3′UTR |
| 24 | GUAGGUGAGUUUAAUUAAAGCUU | AAGCUUUAAUUAAACUCACCUAC | | [1299-1321](23/23) 3′UTR |
| 25 | ACAAACUAAACUCUUCAAAUGCU | AGCAUUUGAAGAGUUUAGUUUGU | | [2254-2276](23/23) 3′UTR |
| 26 | CCUACUUUUGAGCUUACACUUGU | ACAAGUGUAAGCUCAAAAGUAGG | Chimp | [597-619](23/23) ORF |
| 27 | GCCCAUUUGAGUUUUACAUUUGA | UCAAAUGUAAAACUCAAAUGGGC | | [1057-1079](23/23) 3′UTR |
| 28 | GAUUACUCUUCCAUUGAGUGAAU | AUUCACUCAAUGGAAGAGUAAUC | | [1562-1584](23/23) 3′UTR |
| 29 | UGUUAUGCUUACAAAAUGGUGAU | AUCACCAUUUUGUAAGCAUAACA | | [2482-2504](23/23) 3′UTR |
| 30 | AGUUGUCACCACUGACUGGGCAA | UUGCCCAGUCAGUGGUGACAACU | | [2391-2413](23/23) 3′UTR |
| 31 | CUCAAAUUUGAAGGGUUUUUAGA | UCUAAAAACCCUUCAAAUUUGAG | | [1259-1281](23/23) 3′UTR |
| 32 | GCUUCUCCUCUGGUUUCAGGAGA | UCUCCUGAAACCAGAGGAGAAGC | | [679-701](23/23) ORF |
| 33 | GCAACUGCAGCUAACAGGCUGAU | AUCAGCCUGUUAGCUGCAGUUGC | | [931-953](23/23) 3′UTR |
| 34 | GACAGAUGUAUUCAUCCUGGUGU | ACACCAGGAUGAAUACAUCUGUC | | [2152-2174](23/23) 3′UTR |
| 35 | GAACUGCUCAUGGACUAGCUUCA | UGAAGCUAGUCCAUGAGCAGUUC | Dog, Chimp | [632-654](23/23) ORF |
| 36 | UAUUUAGCCUAUCAAAACUUCCA | UGGAAGUUUUGAUAGGCUAAAUA | | [1212-1234](23/23) 3′UTR |
| 37 | CCCAUUUGAGUUUUACAUUUGAU | AUCAAAUGUAAAACUCAAAUGGG | | [1058-1080](23/23) 3′UTR |
| 38 | CUAAGAAGCCACCUGCCUGUGUU | AACACAGGCAGGUGGCUUCUUAG | | [90-112](23/23) 5′UTR |
| 39 | CUAUCAAAACUUCCAAAAGCCCA | UGGGCUUUUGGAAGUUUUGAUAG | | [1220-1242](23/23) 3′UTR |
| 40 | UGAUUACUCUUCCAUUGAGUGAA | UUCACUCAAUGGAAGAGUAAUCA | | [1561-1583](23/23) 3′UTR |
| 41 | UAAUUAAAGCUUAACCCUAGGUA | UACCUAGGGUUAAGCUUUAAUUA | | [1310-1332](23/23) 3′UTR |
| 42 | CCCUAGCUAUUAGCUCCACUUCA | UGAAGUGGAGCUAAUAGCUAGGG | | [2108-2130](23/23) 3′UTR |
| 43 | GGGACAGAUGUAUUCAUCCUGGU | ACCAGGAUGAAUACAUCUGUCCC | | [2150-2172](23/23) 3′UTR |
| 44 | UGAACCCAACCUCAACGAGGUAA | UUACCUCGUUGAGGUUGGGUUCA | Chimp | [323-345](23/23) ORF |
| 45 | AGGUAAGCAAAAGUAGAAGCCCA | UGGGCUUCUACUUUUGCUUACCU | | [1039-1061](23/23) 3′UTR |
| 46 | ACAAUUUGGUUUCAGGUAGGCUU | AAGCCUACCUGAAACCAAAUUGU | | [1084-1106](23/23) 3′UTR |
| 47 | GACUCUCUUGCCUGUUAUGCUUA | UAAGCAUAACAGGCAAGAGAGUC | | [2470-2492](23/23) 3′UTR |
| 48 | GUCUCUUUUCUUUCUGUGUUUCA | UGAAACACAGAAAGAAAAGAGAC | | [900-922](23/23) 3′UTR |
| 49 | CUCUGAUCCUCAGCUCAGGAUUU | AAAUCCUGAGCUGAGGAUCAGAG | | [703-725](23/23) ORF |
| 50 | GUUUAAGCAGGAGAACUGCUCAU | AUGAGCAGUUCUCCUGCUUAAAC | Dog, Chimp | [620-642](23/23) ORF |
| 51 | GGUAAGCAAAAGUAGAAGCCCAU | AUGGGCUUCUACUUUUGCUUACC | | [1040-1062](23/23) 3′UTR |
| 52 | GAACUCUGAUCCUCAGCUCAGGA | UCCUGAGCUGAGGAUCAGAGUUC | | [700-722](23/23) ORF |
| 53 | UCUGUGUUUCACAUUCAUAGCAA | UUGCUAUGAAUGUGAAACACAGA | | [912-934](23/23) 3′UTR |
| 54 | UGUUUUGCAUGUCUAUUGUUAAG | CUUAACAAUAGACAUGCAAAACA | | [2332-2354](23/23) 3′UTR |
| 55 | UGAAAAACAGGUGUGAUCCUGUU | AACAGGAUCACACCUGUUUUUCA | | [2178-2200](23/23) 3′UTR |
| 56 | CCUAUUUUGAUUUUCAUAUGGCU | AGCCAUAUGAAAAUCAAAAUAGG | | [1134-1156](23/23) 3′UTR |
| 57 | CACUGUUCAAAUUAGCCAGUGUU | AACACUGGCUAAUUUGAACAGUG | | [2228-2250](23/23) 3′UTR |
| 58 | CAAAUGUAGUCUCUUUUCUUUCU | AGAAAGAAAAGAGACUACAUUUG | | [892-914](23/23) 3′UTR |
| 59 | CAGAUAACCAUGCAUGCACCCAG | CUGGGUGCAUGCAUGGUUAUCUG | | [1886-1908](23/23) 3′UTR |
| 60 | GUUGAAUACUGUCUUUAAACUAG | CUAGUUUAAAGACAGUAUUCAAC | | [1499-1521](23/23) 3′UTR |
| 61 | GCAACAAAAGCUUGUGGUGCCAU | AUGGCACCACAAGCUUUUGUUGC | | [1415-1437](23/23) 3′UTR |
| 62 | GAUAUGGUUUAUAGUACAGCCUA | UAGGCUGUACUAUAAACCAUAUC | | [1844-1866](23/23) 3′UTR |
| 63 | GACUAUAUAAACCAGAUUUGCCU | AGGCAAAUCUGGUUUAUAUAGUC | | [1114-1136](23/23) 3′UTR |
| 64 | CUUAUUCCAACUAAGUAGAUCAU | AUGAUCUACUUAGUUGGAAUAAG | | [1965-1987](23/23) 3′UTR |
| 65 | GUAUUACAUGUGCUUAAUCUCAG | CUGAGAUUAAGCACAUGUAAUAC | | [1665-1687](23/23) 3′UTR |
| 66 | AGUAAAACUAUUCAGCUAGUCAG | CUGACUAGCUGAAUAGUUUUACU | | [823-845](23/23) 3′UTR |
| 67 | CUCUCUUGCCUGUUAUGCUUACA | UGUAAGCAUAACAGGCAAGAGAG | | [2472-2494](23/23) 3′UTR |
| 68 | AGAUUAUUUCAUGAUUGGGUAGU | ACUACCCAAUCAUGAAAUAAUCU | | [803-825](23/23) 3′UTR |
| 69 | GUUAAAAUGCUGGAGAACUGUCU | AGACAGUUCUCCAGCAUUUUAAC | Chimp | [375-397](23/23) ORF |
| 70 | AAACUAUUCAGCUAGUCAGCUAA | UUAGCUGACUAGCUGAAUAGUUU | | [827-849](23/23) 3′UTR |
| 71 | GAAAAACAGGUGUGAUCCUGUUA | UAACAGGAUCACACCUGUUUUUC | | [2179-2201](23/23) 3′UTR |
| 72 | GCUUCACUGUUUCUUGGUGACUU | AAGUCACCAAGAAACAGUGAAGC | | [1369-1391](23/23) 3′UTR |
| 73 | AGAACCCGGCCAGCAUUUCAGAA | UUCUGAAAUGCUGGCCGGGUUCU | Chimp | [232-254](23/23) ORF |
| 74 | UAGCCUCCACUCAACAAUGUUCA | UGAACAUUGUUGAGUGGAGGCUA | | [2022-2044](23/23) 3′UTR |
| 75 | UGAACUGAUAUUUUUGUGUGUAG | CUACACACAAAAAUAUCAGUUCA | | [1537-1559](23/23) 3′UTR |
| 76 | AGUAAUCUAUCCUCUUUUCAGUA | UACUGAAAAGAGGAUAGAUUACU | | [1645-1667](23/23) 3′UTR |
| 77 | GGUGAGUUUAAUUAAAGCUUAAC | GUUAAGCUUUAAUUAAACUCACC | | [1302-1324](23/23) 3′UTR |
| 78 | UGUUCAAUUCAGCAAGGCUUUCA | UGAAAGCCUUGCUGAAUUGAACA | | [2039-2061](23/23) 3′UTR |
| 79 | GUAAUCUAUCCUCUUUUCAGUAU | AUACUGAAAAGAGGAUAGAUUAC | | [1646-1668](23/23) 3′UTR |
| 80 | UCUUUCUGUGUUUCACAUUCAUA | UAUGAAUGUGAAACACAGAAAGA | | [908-930](23/23) 3′UTR |
| 81 | AGUAGGUGAGUUUAAUUAAAGCU | AGCUUUAAUUAAACUCACCUACU | | [1298-1320](23/23) 3′UTR |
| 82 | GAAAUUAGUUCUGAGAUCUAGUC | GACUAGAUCUCAGAACUAAUUUC | | [1606-1628](23/23) 3′UTR |
| 83 | UCACUAGGGAAUAAUAAAGGCCU | AGGCCUUUAUUAUUCCCUAGUGA | | [1932-1954](23/23) 3′UTR |
| 84 | AAACUCACCGUCCAGAUAACCAU | AUGGUUAUCUGGACGGUGAGUUU | | [1874-1896](23/23) 3′UTR |
| 85 | ACUGUUUCUUGGUGACUUCCUCA | UGAGGAAGUCACCAAGAAACAGU | | [1374-1396](23/23) 3′UTR |
| 86 | GUGUUAUCUCAUCUCUGGGCUUU | AAAGCCCAGAGAUGAGAUAACAC | | [1709-1731](23/23) 3′UTR |
| 87 | ACUAUAAGUGACCUAAAAUGUCA | UGACAUUUUAGGUCACUUAUAGU | | [2207-2229](23/23) 3′UTR |
| 88 | UUAGCUCCACUUCACAUGCUGGA | UCCAGCAUGUGAAGUGGAGCUAA | | [2117-2139](23/23) 3′UTR |
| 89 | AAUGUCACUGUUCAAAUUAGCCA | UGGCUAAUUUGAACAGUGACAUU | | [2223-2245](23/23) 3′UTR |
| 90 | UGGGAAUUGAAGUAUCUCUCCUU | AAGGAGAGAUACUUCAAUUCCCA | | [1734-1756](23/23) 3′UTR |
| 91 | AAAACUAUUCAGCUAGUCAGCUA | UAGCUGACUAGCUGAAUAGUUUU | | [826-848](23/23) 3′UTR |
| 92 | CCACUCAACAAUGUUCAAUUCAG | CUGAAUUGAACAUUGUUGAGUGG | | [2028-2050](23/23) 3′UTR |
| 93 | CAUAUGGCUUUUUUUUCUCUAAG | CUUAGAGAAAAAAAAGCCAUAUG | | [1148-1170](23/23) 3′UTR |
| 94 | AAGCUUAACCCUAGGUAAGAGUA | UACUCUUACCUAGGGUUAAGCUU | | [1316-1338](23/23) 3′UTR |
| 95 | GAAUUGCUGGACUGUGGCUAUCA | UGAUAGCCACAGUCCAGCAAUUC | Chimp | [252-274](23/23) ORF |
| 96 | GCUAAGUGAUUUUGACUACUGGG | CCCAGUAGUCAAAAUCACUUAGC | Chimp | [287-309](23/23) ORF |
| 97 | AAAACAGGUGUGAUCCUGUUACU | AGUAACAGGAUCACACCUGUUUU | | [2181-2203](23/23) 3′UTR |
| 98 | UGCUCAAGAUGUCCUGCGGCUUU | AAAGCCGCAGGACAUCUUGAGCA | Chimp | [467-489](23/23) ORF |
| 99 | GUGUUACUGAAAAACAGGUGUGA | UCACACCUGUUUUUCAGUAACAC | | [2171-2193](23/23) 3′UTR |
| 100 | AACUCUGAUCCUCAGCUCAGGAU | AUCCUGAGCUGAGGAUCAGAGUU | | [701-723](23/23) ORF |
| 101 | ACAGAUGUAUUCAUCCUGGUGUU | AACACCAGGAUGAAUACAUCUGU | | [2153-2175](23/23) 3′UTR |
| 102 | UGUUUAAGCAGGAGAACUGCUCA | UGAGCAGUUCUCCUGCUUAAACA | Dog, Chimp | [619-641](23/23) ORF |
| 103 | ACUGCUUCACUGUUUCUUGGUGA | UCACCAAGAAACAGUGAAGCAGU | | [1366-1388](23/23) 3′UTR |
| 104 | AAGAAGCCACCUGCCUGUGUUUA | UAAACACAGGCAGGUGGCUUCUU | | [92-114](23/23) 5′UTR |
| 105 | CCACUUUGAAUUAUUGAAACGGG | CCCGUUUCAAUAAUUCAAAGUGG | | [1791-1813](23/23) 3′UTR |
| 106 | UCAAGAUGUCCUGCGGCUUUCCU | AGGAAAGCCGCAGGACAUCUUGA | Chimp | [470-492](23/23) ORF |
| 107 | GAGAUAUGGUUUAUAGUACAGCC | GGCUGUACUAUAAACCAUAUCUC | | [1842-1864](23/23) 3′UTR |
| 108 | UACACUUGUGUUUAAGCAGGAGA | UCUCCUGCUUAAACACAAGUGUA | Chimp | [611-633](23/23) ORF |
| 109 | GAUUCACUUAGUAAUCUAUCCUC | GAGGAUAGAUUACUAAGUGAAUC | | [1636-1658](23/23) 3′UTR |
| 110 | GGUGCCAUUUCAGUAACCACGGU | ACCGUGGUUACUGAAAUGGCACC | | [1430-1452](23/23) 3′UTR |
| 111 | AAUCAAUGUUGUUUUGCAUGUCU | AGACAUGCAAAACAACAUUGAUU | | [2323-2345](23/23) 3′UTR |
| 112 | AAUAAUGGAACUGCUUCACUGUU | AACAGUGAAGCAGUUCCAUUAUU | | [1357-1379](23/23) 3′UTR |
| 113 | UAUCCUUGCUGUGGGUCGUGGAU | AUCCACGACCCACAGCAAGGAUA | | [2062-2084](23/23) 3′UTR |
| 114 | GAUUCCACAAUUUGGUUUCAGGU | ACCUGAAACCAAAUUGUGGAAUC | | [1078-1100](23/23) 3′UTR |
| 115 | UAGUAAAACUAUUCAGCUAGUCA | UGACUAGCUGAAUAGUUUUACUA | | [822-844](23/23) 3′UTR |
| 116 | ACAUUUGAUUCCACAAUUUGGUU | AACCAAAUUGUGGAAUCAAAUGU | | [1072-1094](23/23) 3′UTR |
| 117 | CAAGGCUUUCAUAUCCUUGCUGU | ACAGCAAGGAUAUGAAAGCCUUG | | [2051-2073](23/23) 3′UTR |
| 118 | GAAGUGAUUCAAAAUAGUGUAGA | UCUACACUAUUUUGAAUCACUUC | | [969-991](23/23) 3′UTR |
| 119 | UGUGUUUCACAUUCAUAGCAACU | AGUUGCUAUGAAUGUGAAACACA | | [914-936](23/23) 3′UTR |
| 120 | GUUUCACAUUCAUAGCAACUGCA | UGCAGUUGCUAUGAAUGUGAAAC | | [917-939](23/23) 3′UTR |
| 121 | CUCAUCUCUGGGCUUUUCUGGGA | UCCCAGAAAAGCCCAGAGAUGAG | | [1716-1738](23/23) 3′UTR |
| 122 | UCUUAUUCCAACUAAGUAGAUCA | UGAUCUACUUAGUUGGAAUAAGA | | [1964-1986](23/23) 3′UTR |
| 123 | GUUUAAUUAAAGCUUAACCCUAG | CUAGGGUUAAGCUUUAAUUAAAC | | [1307-1329](23/23) 3′UTR |
| 124 | ACAUUCAUAGCAACUGCAGCUAA | UUAGCUGCAGUUGCUAUGAAUGU | | [922-944](23/23) 3′UTR |
| 125 | UUGAUUACUCUUCCAUUGAGUGA | UCACUCAAUGGAAGAGUAAUCAA | | [1560-1582](23/23) 3′UTR |
| 126 | GCUUGCGAGGUUGUGUUAUGCAC | GUGCAUAACACAACCUCGCAAGC | | [508-530](23/23) ORF |
| 127 | AGAAGCCACCUGCCUGUGUUUAC | GUAAACACAGGCAGGUGGCUUCU | | [93-115](23/23) 5′UTR |
| 128 | AAUGUAGUCUCUUUUCUUUCUGU | ACAGAAAGAAAAGAGACUACAUU | | [894-916](23/23) 3′UTR |
| 129 | UAAGAAGCCACCUGCCUGUGUUU | AAACACAGGCAGGUGGCUUCUUA | | [91-113](23/23) 5′UTR |
| 130 | AGAACUGCUCAUGGACUAGCUUC | GAAGCUAGUCCAUGAGCAGUUCU | Dog, Chimp | [631-653](23/23) ORF |
| 131 | CUAUAUAAACCAGAUUUGCCUAU | AUAGGCAAAUCUGGUUUAUAUAG | | [1116-1138](23/23) 3′UTR |
| 132 | UGGUAAUAGACUAUAUAAACCAG | CUGGUUUAUAUAGUCUAUUACCA | | [1106-1128](23/23) 3′UTR |
| 133 | GCCAAGAUAAAUCAAUGUUGUUU | AAACAACAUUGAUUUAUCUUGGC | | [2314-2336](23/23) 3′UTR |
| 134 | UCAGAGGAUUUUUUAAAUCACAG | CUGUGAUUUAAAAAAUCCUCUGA | | [1174-1196](23/23) 3′UTR |
| 135 | GAUAUUUAGCCUAUCAAAACUUC | GAAGUUUUGAUAGGCUAAAUAUC | | [1210-1232](23/23) 3′UTR |
| 136 | GAGAACUCUGAUCCUCAGCUCAG | CUGAGCUGAGGAUCAGAGUUCUC | | [698-720](23/23) ORF |
| 137 | CACUGUUUCUUGGUGACUUCCUC | GAGGAAGUCACCAAGAAACAGUG | | [1373-1395](23/23) 3′UTR |
| 138 | AGUAAAUGAGAAAUAUUACGGCA | UGCCGUAAUAUUUCUCAUUUACU | | [1335-1357](23/23) 3′UTR |
| 139 | ACUAUAUAAACCAGAUUUGCCUA | UAGGCAAAUCUGGUUUAUAUAGU | | [1115-1137](23/23) 3′UTR |
| 140 | CAAUUUGGUUUCAGGUAGGCUUG | CAAGCCUACCUGAAACCAAAUUG | | [1085-1107](23/23) 3′UTR |
| 141 | CAAAGGUUCACUGUGUUUCUGCC | GGCAGAAACACAGUGAACCUUUG | | [2358-2380](23/23) 3′UTR |
| 142 | CAUUUCACCAUGGCAGUGUUAUC | GAUAACACUGCCAUGGUGAAAUG | | [1694-1716](23/23) 3′UTR |
| 143 | AAAAACUUUACUCACUGAUUGGA | UCCAAUCAGUGAGUAAAGUUUUU | | [739-761](23/23) ORF |
| 144 | UGUAGUCUCUUUUCUUUCUGUGU | ACACAGAAAGAAAAGAGACUACA | | [896-918](23/23) 3′UTR |
| 145 | GGUGUUACUGAAAAACAGGUGUG | CACACCUGUUUUUCAGUAACACC | | [2170-2192](23/23) 3′UTR |
| 146 | CUGUUCUUAAGUGUUGAAUACUG | CAGUAUUCAACACUUAAGAACAG | | [1487-1509](23/23) 3′UTR |
| 147 | GAAAAAACUUUACUCACUGAUUG | CAAUCAGUGAGUAAAGUUUUUUC | | [737-759](23/23) ORF |
| 148 | GAACUGAUAUUUUUGUGUGUAGU | ACUACACACAAAAAUAUCAGUUC | | [1538-1560](23/23) 3′UTR |
| 149 | CAUCGAUGUAGAACUGUUGUCCU | AGGACAACAGUUCUACAUCGAUG | | [2425-2447](23/23) 3′UTR |
| 150 | CUUGGUUGCUCAAAGGUCCUUGU | ACAAGGACCUUUGAGCAACCAAG | Chimp | [420-442](23/23) ORF |
| 151 | CAACUAAGUAGAUCAUUAUCUCU | AGAGAUAAUGAUCUACUUAGUUG | | [1972-1994](23/23) 3′UTR |
| 152 | UAAAAUGCUGGAGAACUGUCUGU | ACAGACAGUUCUCCAGCAUUUUA | Dog, Chimp | [377-399](23/23) ORF |
| 153 | GAUAAGGAGCUUAUUCAGGUUUC | GAAACCUGAAUAAGCUCCUUAUC | | [2082-2104](23/23) 3′UTR |
| 154 | AAACAGAGCCGUUGACCAUGGUU | AACCAUGGUCAACGGCUCUGUUU | Chimp, | [187-209](23/23) 5′UTR + |
| | | | Rat, Ms | ORF |
| 155 | CUGCUAAGUGAUUUUGACUACUG | CAGUAGUCAAAAUCACUUAGCAG | Chimp | [285-307](23/23) ORF |
| 156 | CCUCACUCUAAUGUUUUAAAGAG | CUCUUUAAAACAUUAGAGUGAGG | | [1392-1414](23/23) 3′UTR |
| 157 | UUUUGAGCUUACACUUGUGUUUA | UAAACACAAGUGUAAGCUCAAAA | Chimp | [602-624](23/23) ORF |
| 158 | CUGAAAAACAGGUGUGAUCCUGU | ACAGGAUCACACCUGUUUUUCAG | | [2177-2199](23/23) 3′UTR |
| 159 | UGCUUACAAAAUGGUGAUGGCUU | AAGCCAUCACCAUUUUGUAAGCA | | [2487-2509](23/23) 3′UTR |
| 160 | GUGAGUUUAAUUAAAGCUUAACC | GGUUAAGCUUUAAUUAAACUCAC | | [1303-1325](23/23) 3′UTR |
| 161 | GUGAUGGCUUAUGGAAGGCUGUU | AACAGCCUUCCAUAAGCCAUCAC | | [2500-2522](23/23) 3′UTR |
| 162 | CACUUUGAAUUAUUGAAACGGGU | ACCCGUUUCAAUAAUUCAAAGUG | | [1792-1814](23/23) 3′UTR |
| 163 | GUUCACUGUGUUUCUGCCGCUGU | ACAGCGGCAGAAACACAGUGAAC | | [2363-2385](23/23) 3′UTR |
| 164 | AAGAACCCGGCCAGCAUUUCAGA | UCUGAAAUGCUGGCCGGGUUCUU | Chimp, Ms | [231-253](23/23) ORF |
| 165 | UACUCUUCCAUUGAGUGAAUGAU | AUCAUUCACUCAAUGGAAGAGUA | | [1565-1587](23/23) 3′UTR |
| 166 | CUUGUCCCUGAGAAACUGACCCA | UGGGUCAGUUUCUCAGGGACAAG | Dog, Chimp | [438-460](23/23) ORF |
| 167 | AAGAUGUCCUGCGGCUUUCCUCA | UGAGGAAAGCCGCAGGACAUCUU | Chimp | [472-494](23/23) ORF |
| 168 | UAGUCUCUUUUCUUUCUGUGUUU | AAACACAGAAAGAAAAGAGACUA | | [898-920](23/23) 3′UTR |
| 169 | GUGUUGAAUACUGUCUUUAAACU | AGUUUAAAGACAGUAUUCAACAC | | [1497-1519](23/23) 3′UTR |
| 170 | AGCAACUGCAGCUAACAGGCUGA | UCAGCCUGUUAGCUGCAGUUGCU | | [930-952](23/23) 3′UTR |
| 171 | UGAAAAUGUAUGUAAAAAGCUGG | CCAGCUUUUUACAUACAUUUUCA | Chimp, Ms | [545-567](23/23) ORF |
| 172 | CUCUUUUCUUUCUGUGUUUCACA | UGUGAAACACAGAAAGAAAAGAG | | [902-924](23/23) 3′UTR |
| 173 | UGCCCUAGCUAUUAGCUCCACUU | AAGUGGAGCUAAUAGCUAGGGCA | | [2106-2128](23/23) 3′UTR |
| 174 | AGCAAACUAAACUUGGUUGCUCA | UGAGCAACCAAGUUUAGUUUGCU | Chimp | [409-431](23/23) ORF |
| 175 | CUAUUCAGCUAGUCAGCUAAAGU | ACUUUAGCUGACUAGCUGAAUAG | | [830-852](23/23) 3′UTR |
| 176 | UAGAGGUCGCUUCUCCUCUGGUU | AACCAGAGGAGAAGCGACCUCUA | | [671-693](23/23) ORF |
| 177 | AAAAGCCCACACCACCAGUUCCU | AGGAACUGGUGGUGUGGGCUUUU | | [1234-1256](23/23) 3′UTR |
| 178 | GUCCUUGUCCCUGAGAAACUGAC | GUCAGUUUCUCAGGGACAAGGAC | Dog, Chimp | [435-457](23/23) ORF |
| 179 | GAACUGCUUCACUGUUUCUUGGU | ACCAAGAAACAGUGAAGCAGUUC | | [1364-1386](23/23) 3′UTR |
| 180 | AACAGAGCCGUUGACCAUGGUUG | CAACCAUGGUCAACGGCUCUGUU | Chimp, | [188-210](23/23) 5′UTR + |
| | | | Rat, Ms | ORF |
| 181 | UGUGUAGUUGAUUACUCUUCCAU | AUGGAAGAGUAAUCAACUACACA | | [1553-1575](23/23) 3′UTR |
| 182 | CUGAACCCAACCUCAACGAGGUA | UACCUCGUUGAGGUUGGGUUCAG | Chimp | [322-344](23/23) ORF |
| 183 | UUUCUGGGAAUUGAAGUAUCUCU | AGAGAUACUUCAAUUCCCAGAAA | | [1730-1752](23/23) 3′UTR |
| 184 | GCUUUCAUAUCCUUGCUGUGGGU | ACCCACAGCAAGGAUAUGAAAGC | | [2055-2077](23/23) 3′UTR |
| 185 | UCUGAUUCACUUAGUAAUCUAUC | GAUAGAUUACUAAGUGAAUCAGA | | [1633-1655](23/23) 3′UTR |
| 186 | CAUUUCAGUAACCACGGUGUUGU | ACAACACCGUGGUUACUGAAAUG | | [1435-1457](23/23) 3′UTR |
| 187 | AAUGUUCAAUUCAGCAAGGCUUU | AAAGCCUUGCUGAAUUGAACAUU | | [2037-2059](23/23) 3′UTR |
| 188 | AGCUCCACUUCACAUGCUGGAGA | UCUCCAGCAUGUGAAGUGGAGCU | | [2119-2141](23/23) 3′UTR |
| 189 | AAACUGACCCAGAGAAUUGCUCA | UGAGCAAUUCUCUGGGUCAGUUU | Chimp, Ms | [450-472](23/23) ORF |
| 190 | CUUACACUUGUGUUUAAGCAGGA | UCCUGCUUAAACACAAGUGUAAG | Chimp | [609-631](23/23) ORF |
| 191 | UAAGCUCCAAAGGUUCACUGUGU | ACACAGUGAACCUUUGGAGCUUA | | [2351-2373](23/23) 3′UTR |
| 192 | ACUUUUGAGCUUACACUUGUGUU | AACACAAGUGUAAGCUCAAAAGU | Chimp | [600-622](23/23) ORF |
| 193 | UGUUACUGAAAAACAGGUGUGAU | AUCACACCUGUUUUUCAGUAACA | | [2172-2194](23/23) 3′UTR |
| 194 | UUUUUUCCACCUUGGAUACCUGU | ACAGGUAUCCAAGGUGGAAAAAA | | [1910-1932](23/23) 3′UTR |
| 195 | UUACUCUUCCAUUGAGUGAAUGA | UCAUUCACUCAAUGGAAGAGUAA | | [1564-1586](23/23) 3′UTR |

TABLE E
additional 23mers

| | | | | |
|---|---|---|---|---|
| | | | | Hum-34222182 |
| Number | Sense siRNA | AntiSense siRNA | Other Sp | ORF: 204-785 |

| | | | | |
|---|---|---|---|---|
| 1 | CAGUGUUCUAACAAACUAAACUC | GAGUUUAGUUUGUUAGAACACUG | | [2244-2266] 3′UTR |
| 2 | CCAGUGUUCUAACAAACUAAACU | AGUUUAGUUUGUUAGAACACUGG | | [2243-2265] 3′UTR |
| 3 | GCCAGUGUUCUAACAAACUAAAC | GUUUAGUUUGUUAGAACACUGGC | | [2242-2264] 3′UTR |
| 4 | AGCCAGUGUUCUAACAAACUAAA | UUUAGUUUGUUAGAACACUGGCU | | [2241-2263] 3′UTR |
| 5 | UAGCCAGUGUUCUAACAAACUAA | UUAGUUUGUUAGAACACUGGCUA | | [2240-2262] 3′UTR |
| 6 | UUAGCCAGUGUUCUAACAAACUA | UAGUUUGUUAGAACACUGGCUAA | | [2239-2261] 3′UTR |
| 7 | GGAUUAUGUUGUUCCUGAACCCA | UGGGUUCAGGAACAACAUAAUCC | Chimp | [308-330] ORF |
| 8 | GGGAUUAUGUUGUUCCUGAACCC | GGGUUCAGGAACAACAUAAUCCC | Chimp | [307-329] ORF |
| 9 | UGGGAUUAUGUUGUUCCUGAACC | GGUUCAGGAACAACAUAAUCCCA | Chimp | [306-328] ORF |
| 10 | CUGGGAUUAUGUUGUUCCUGAAC | GUUCAGGAACAACAUAAUCCCAG | Chimp | [305-327] ORF |
| 11 | ACUGGGAUUAUGUUGUUCCUGAA | UUCAGGAACAACAUAAUCCCAGU | Chimp | [304-326] ORF |
| 12 | GGCUUUUCUGGGAAUUGAAGUAU | AUACUUCAAUUCCCAGAAAAGCC | | [1726-1748] 3′UTR |
| 13 | GGGCUUUUCUGGGAAUUGAAGUA | UACUUCAAUUCCCAGAAAAGCCC | | [1725-1747] 3′UTR |
| 14 | UGGGCUUUUCUGGGAAUUGAAGU | ACUUCAAUUCCCAGAAAAGCCCA | | [1724-1746] 3′UTR |
| 15 | CUGGGCUUUUCUGGGAAUUGAAG | CUUCAAUUCCCAGAAAAGCCCAG | | [1723-1745] 3′UTR |
| 16 | UCUGGGCUUUUCUGGGAAUUGAA | UUCAAUUCCCAGAAAAGCCCAGA | | [1722-1744] 3′UTR |
| 17 | GAUGGAAUAGGUAAGCAAAAGUA | UACUUUUGCUUACCUAUUCCAUC | | [1031-1053] 3′UTR |
| 18 | GGAUGGAAUAGGUAAGCAAAAGU | ACUUUUGCUUACCUAUUCCAUCC | | [1030-1052] 3′UTR |
| 19 | GGGAUGGAAUAGGUAAGCAAAAG | CUUUUGCUUACCUAUUCCAUCCC | | [1029-1051] 3′UTR |
| 20 | UGGGAUGGAAUAGGUAAGCAAAA | UUUUGCUUACCUAUUCCAUCCCA | | [1028-1050] 3′UTR |
| 21 | AUGGGAUGGAAUAGGUAAGCAAA | UUUGCUUACCUAUUCCAUCCCAU | | [1027-1049] 3′UTR |
| 22 | CGUGAACUUGGAAAUUGAAAAUG | CAUUUUCAAUUUCCAAGUUCACG | Dog, Chin, GP, Rat | [530-552] ORF |
| 23 | ACGUGAACUUGGAAAUUGAAAAU | AUUUUCAAUUUCCAAGUUCACGU | Dog, Chin, GP, Rat | [529-551] ORF |
| 24 | CACGUGAACUUGGAAAUUGAAAA | UUUUCAAUUUCCAAGUUCACGUG | Dog, Chin, GP, Rat | [528-550] ORF |
| 25 | GCACGUGAACUUGGAAAUUGAAA | UUUCAAUUUCCAAGUUCACGUGC | Dog, Chin, GP, Rat | [527-549] ORF |
| 26 | UGCACGUGAACUUGGAAAUUGAA | UUCAAUUUCCAAGUUCACGUGCA | Dog, Chin, GP, Rat | [526-548] ORF |
| 27 | AAUGGGAUGGAAUAGGUAAGCAA | UUGCUUACCUAUUCCAUCCCAUU | | [1026-1048] 3′UTR |
| 28 | AUUAGCCAGUGUUCUAACAAACU | AGUUUGUUAGAACACUGGCUAAU | | [2238-2260] 3′UTR |
| 29 | AAUUAGCCAGUGUUCUAACAAAC | GUUUGUUAGAACACUGGCUAAUU | | [2237-2259] 3′UTR |
| 30 | AAAUUAGCCAGUGUUCUAACAAA | UUUGUUAGAACACUGGCUAAUUU | | [2236-2258] 3′UTR |
| 31 | GAUUGAAGGGUCCUAAAAAGGGA | UCCCUUUUUAGGACCCUUCAAUC | | [770-792] ORF + 3′UTR |
| 32 | UGAUUGAAGGGUCCUAAAAAGGG | CCCUUUUUAGGACCCUUCAAUCA | | [769-791] ORF + 3′UTR |
| 33 | GUGAUUGAAGGGUCCUAAAAAGG | CCUUUUUAGGACCCUUCAAUCAC | | [768-790] ORF + 3′UTR |
| 34 | AGUGAUUGAAGGGUCCUAAAAAG | CUUUUUAGGACCCUUCAAUCACU | | [767-789] ORF + 3′UTR |
| 35 | CAGUGAUUGAAGGGUCCUAAAAA | UUUUUAGGACCCUUCAAUCACUG | | [766-788] ORF + 3′UTR |
| 36 | GAAUGAUGAAUACCUGUGAGGAU | AUCCUCACAGGUAUUCAUCAUUC | | [1581-1603] 3′UTR |
| 37 | UGAAUGAUGAAUACCUGUGAGGA | UCCUCACAGGUAUUCAUCAUUCA | | [1580-1602] 3′UTR |
| 38 | GUGAAUGAUGAAUACCUGUGAGG | CCUCACAGGUAUUCAUCAUUCAC | | [1579-1601] 3′UTR |
| 39 | AGUGAAUGAUGAAUACCUGUGAG | CUCACAGGUAUUCAUCAUUCACU | | [1578-1600] 3′UTR |
| 40 | GAGUGAAUGAUGAAUACCUGUGA | UCACAGGUAUUCAUCAUUCACUC | | [1577-1599] 3′UTR |
| 41 | CAGAGAGCCUGCUAAGUGAUUUU | AAAAUCACUUAGCAGGCUCUCUG | Chimp | [277-299] ORF |
| 42 | CCAGAGAGCCUGCUAAGUGAUUU | AAAUCACUUAGCAGGCUCUCUGG | Chimp | [276-298] ORF |
| 43 | CCCAGAGAGCCUGCUAAGUGAUU | AAUCACUUAGCAGGCUCUCUGGG | Chimp | [275-297] ORF |
| 44 | ACCCAGAGAGCCUGCUAAGUGAU | AUCACUUAGCAGGCUCUCUGGGU | Chimp | [274-296] ORF |
| 45 | CACCCAGAGAGCCUGCUAAGUGA | UCACUUAGCAGGCUCUCUGGGUG | Chimp | [273-295] ORF |
| 46 | AGAAUUGGGCCAAGAUAAAUCAA | UUGAUUUAUCUUGGCCCAAUUCU | | [2306-2328] 3′UTR |
| 47 | UAGAAUUGGGCCAAGAUAAAUCA | UGAUUUAUCUUGGCCCAAUUCUA | | [2305-2327] 3′UTR |
| 48 | AUAGAAUUGGGCCAAGAUAAAUC | GAUUUAUCUUGGCCCAAUUCUAU | | [2304-2326] 3′UTR |
| 49 | UAUAGAAUUGGGCCAAGAUAAAU | AUUUAUCUUGGCCCAAUUCUAUA | | [2303-2325] 3′UTR |
| 50 | UUAUAGAAUUGGGCCAAGAUAAA | UUUAUCUUGGCCCAAUUCUAUAA | | [2302-2324] 3′UTR |
| 51 | UGCUGUGGGUCGUGGAUAAGGAG | CUCCUUAUCCACGACCCACAGCA | | [2068-2090] 3′UTR |
| 52 | UUGCUGUGGGUCGUGGAUAAGGA | UCCUUAUCCACGACCCACAGCAA | | [2067-2089] 3′UTR |
| 53 | CUUGCUGUGGGUCGUGGAUAAGG | CCUUAUCCACGACCCACAGCAAG | | [2066-2088] 3′UTR |
| 54 | CCUUGCUGUGGGUCGUGGAUAAG | CUUAUCCACGACCCACAGCAAGG | | [2065-2087] 3′UTR |
| 55 | UCCUUGCUGUGGGUCGUGGAUAA | UUAUCCACGACCCACAGCAAGGA | | [2064-2086] 3′UTR |
| 56 | AGGUAAGAGUAAAUGAGAAAUAU | AUAUUUCUCAUUUACUCUUACCU | | [1328-1350] 3′UTR |
| 57 | UAGGUAAGAGUAAAUGAGAAAUA | UAUUUCUCAUUUACUCUUACCUA | | [1327-1349] 3′UTR |
| 58 | CUAGGUAAGAGUAAAUGAGAAAU | AUUUCUCAUUUACUCUUACCUAG | | [1326-1348] 3′UTR |
| 59 | CCUAGGUAAGAGUAAAUGAGAAA | UUUCUCAUUUACUCUUACCUAGG | | [1325-1347] 3′UTR |
| 60 | CCCUAGGUAAGAGUAAAUGAGAA | UUCUCAUUUACUCUUACCUAGGG | | [1324-1346] 3′UTR |
| 61 | CUGUCCAAAUCAAAGCAAACUAA | UUAGUUUGCUUUGAUUUGGACAG | Dog, Chimp | [396-418] ORF |
| 62 | UCUGUCCAAAUCAAAGCAAACUA | UAGUUUGCUUUGAUUUGGACAGA | Dog, Chimp | [395-417] ORF |
| 63 | GUCUGUCCAAAUCAAAGCAAACU | AGUUUGCUUUGAUUUGGACAGAC | Dog, Chimp | [394-416] ORF |
| 64 | UGUCUGUCCAAAUCAAAGCAAAC | GUUUGCUUUGAUUUGGACAGACA | Dog, Chimp | [393-415] ORF |
| 65 | CUGUCUGUCCAAAUCAAAGCAAA | UUUGCUUUGAUUUGGACAGACAG | Dog, Chimp | [392-414] ORF |
| 66 | UCAUGAUUGGGUAGUAAAACUAU | AUAGUUUUACUACCCAAUCAUGA | | [811-833] 3′UTR |
| 67 | UUCAUGAUUGGGUAGUAAAACUA | UAGUUUUACUACCCAAUCAUGAA | | [810-832] 3′UTR |
| 68 | UUUCAUGAUUGGGUAGUAAAACU | AGUUUUACUACCCAAUCAUGAAA | | [809-831] 3′UTR |
| 69 | AUUUCAUGAUUGGGUAGUAAAAC | GUUUUACUACCCAAUCAUGAAAU | | [808-830] 3′UTR |
| 70 | UAUUUCAUGAUUGGGUAGUAAAA | UUUUACUACCCAAUCAUGAAAUA | | [807-829] 3′UTR |
| 71 | ACAGUGAUUGAAGGGUCCUAAAA | UUUUAGGACCCUUCAAUCACUGU | | [765-787] ORF + 3′UTR |
| 72 | AACAGUGAUUGAAGGGUCCUAAA | UUUAGGACCCUUCAAUCACUGUU | | [764-786] ORF + 3′UTR |
| 73 | GGAAGGCUGUUAAAUUAAUAUUC | GAAUAUUAAUUUAACAGCCUUCC | | [2512-2534] 3′UTR |
| 74 | UGGAAGGCUGUUAAAUUAAUAUU | AAUAUUAAUUUAACAGCCUUCCA | | [2511-2533] 3′UTR |
| 75 | AUGGAAGGCUGUUAAAUUAAUAU | AUAUUAAUUUAACAGCCUUCCAU | | [2510-2532] 3′UTR |
| 76 | UAUGGAAGGCUGUUAAAUUAAUA | UAUUAAUUUAACAGCCUUCCAUA | | [2509-2531] 3′UTR |
| 77 | UUAUGGAAGGCUGUUAAAUUAAU | AUUAAUUUAACAGCCUUCCAUAA | | [2508-2530] 3′UTR |
| 78 | CAAGGGUAGUAGCUGUAUACUAC | GUAGUAUACAGCUACUACCCUUG | | [1769-1791] 3′UTR |
| 79 | UCAAGGGUAGUAGCUGUAUACUA | UAGUAUACAGCUACUACCCUUGA | | [1768-1790] 3′UTR |
| 80 | GUCAAGGGUAGUAGCUGUAUACU | AGUAUACAGCUACUACCCUUGAC | | [1767-1789] 3′UTR |
| 81 | UGUCAAGGGUAGUAGCUGUAUAC | GUAUACAGCUACUACCCUUGACA | | [1766-1788] 3′UTR |
| 82 | UUGUCAAGGGUAGUAGCUGUAUA | UAUACAGCUACUACCCUUGACAA | | [1765-1787] 3′UTR |
| 83 | CCAAAUCAAAGCAAACUAAACUU | AAGUUUAGUUUGCUUUGAUUUGG | Chimp | [400-422] ORF |
| 84 | UCCAAAUCAAAGCAAACUAAACU | AGUUUAGUUUGCUUUGAUUUGGA | Chimp | [399-421] ORF |
| 85 | GUCCAAAUCAAAGCAAACUAAAC | GUUUAGUUUGCUUUGAUUUGGAC | Chimp | [398-420] ORF |
| 86 | UGUCCAAAUCAAAGCAAACUAAA | UUUAGUUUGCUUUGAUUUGGACA | Chimp | [397-419] ORF |
| 87 | GCUUAUGGAAGGCUGUUAAAUUA | UAAUUUAACAGCCUUCCAUAAGC | | [2506-2528] 3′UTR |
| 88 | GGCUUAUGGAAGGCUGUUAAAUU | AAUUUAACAGCCUUCCAUAAGCC | | [2505-2527] 3′UTR |
| 89 | UGGCUUAUGGAAGGCUGUUAAAU | AUUUAACAGCCUUCCAUAAGCCA | | [2504-2526] 3′UTR |
| 90 | AUGGCUUAUGGAAGGCUGUUAAA | UUUAACAGCCUUCCAUAAGCCAU | | [2503-2525] 3′UTR |
| 91 | GAUGGCUUAUGGAAGGCUGUUAA | UUAACAGCCUUCCAUAAGCCAUC | | [2502-2524] 3′UTR |
| 92 | UCCUGUUACUGAUACUAUAAGUG | CACUUAUAGUAUCAGUAACAGGA | | [2194-2216] 3′UTR |
| 93 | AUCCUGUUACUGAUACUAUAAGU | ACUUAUAGUAUCAGUAACAGGAU | | [2193-2215] 3′UTR |
| 94 | GAUCCUGUUACUGAUACUAUAAG | CUUAUAGUAUCAGUAACAGGAUC | | [2192-2214] 3′UTR |
| 95 | UGAUCCUGUUACUGAUACUAUAA | UUAUAGUAUCAGUAACAGGAUCA | | [2191-2213] 3′UTR |
| 96 | GUGAUCCUGUUACUGAUACUAUA | UAUAGUAUCAGUAACAGGAUCAC | | [2190-2212] 3′UTR |
| 97 | GGUCCUUGUCCCUGAGAAACUGA | UCAGUUUCUCAGGGACAAGGACC | Chimp | [434-456] ORF |
| 98 | AGGUCCUUGUCCCUGAGAAACUG | CAGUUUCUCAGGGACAAGGACCU | Chimp | [433-455] ORF |
| 99 | AAGGUCCUUGUCCCUGAGAAACU | AGUUUCUCAGGGACAAGGACCUU | Chimp | [432-454] ORF |
| 100 | AAAGGUCCUUGUCCCUGAGAAAC | GUUUCUCAGGGACAAGGACCUUU | Chimp | [431-453] ORF |
| 101 | CAAAGGUCCUUGUCCCUGAGAAA | UUUCUCAGGGACAAGGACCUUUG | Chimp | [430-452] ORF |
| 102 | CCAACUAAGUAGAUCAUUAUCUC | GAGAUAAUGAUCUACUUAGUUGG | | [1971-1993] 3′UTR |
| 103 | UCCAACUAAGUAGAUCAUUAUCU | AGAUAAUGAUCUACUUAGUUGGA | | [1970-1992] 3′UTR |
| 104 | UUCCAACUAAGUAGAUCAUUAUC | GAUAAUGAUCUACUUAGUUGGAA | | [1969-1991] 3′UTR |
| 105 | AUUCCAACUAAGUAGAUCAUUAU | AUAAUGAUCUACUUAGUUGGAAU | | [1968-1990] 3′UTR |
| 106 | UAUUCCAACUAAGUAGAUCAUUA | UAAUGAUCUACUUAGUUGGAAUA | | [1967-1989] 3′UTR |
| 107 | UGGUUAAAAUGCUGGAGAACUGU | ACAGUUCUCCAGCAUUUUAACCA | Chimp | [373-395] ORF |
| 108 | UUGGUUAAAAUGCUGGAGAACUG | CAGUUCUCCAGCAUUUUAACCAA | Chimp | [372-394] ORF |
| 109 | UUUGGUUAAAAUGCUGGAGAACU | AGUUCUCCAGCAUUUUAACCAAA | Chimp | [371-393] ORF |
| 110 | AUUUGGUUAAAAUGCUGGAGAAC | GUUCUCCAGCAUUUUAACCAAAU | Chimp | [370-392] ORF |
| 111 | AAUUUGGUUAAAAUGCUGGAGAA | UUCUCCAGCAUUUUAACCAAAUU | Chimp | [369-391] ORF |
| 112 | CCAUUGAGUGAAUGAUGAAUACC | GGUAUUCAUCAUUCACUCAAUGG | | [1572-1594] 3′UTR |
| 113 | UCCAUUGAGUGAAUGAUGAAUAC | GUAUUCAUCAUUCACUCAAUGGA | | [1571-1593] 3′UTR |
| 114 | UUCCAUUGAGUGAAUGAUGAAUA | UAUUCAUCAUUCACUCAAUGGAA | | [1570-1592] 3′UTR |
| 115 | CUUCCAUUGAGUGAAUGAUGAAU | AUUCAUCAUUCACUCAAUGGAAG | | [1569-1591] 3′UTR |
| 116 | UCUUCCAUUGAGUGAAUGAUGAA | UUCAUCAUUCACUCAAUGGAAGA | | [1568-1590] 3′UTR |
| 117 | GAAUUUAGCCUCCACUCAACAAU | AUUGUUGAGUGGAGGCUAAAUUC | | [2017-2039] 3′UTR |
| 118 | AGAAUUUAGCCUCCACUCAACAA | UUGUUGAGUGGAGGCUAAAUUCU | | [2016-2038] 3′UTR |
| 119 | GAGAAUUUAGCCUCCACUCAACA | UGUUGAGUGGAGGCUAAAUUCUC | | [2015-2037] 3′UTR |
| 120 | AGAGAAUUUAGCCUCCACUCAAC | GUUGAGUGGAGGCUAAAUUCUCU | | [2014-2036] 3′UTR |
| 121 | GAGAGAAUUUAGCCUCCACUCAA | UUGAGUGGAGGCUAAAUUCUCUC | | [2013-2035] 3′UTR |
| 122 | CAGGAUUUCGACUUGUUAAGAAA | UUUCUUAACAAGUCGAAAUCCUG | | [718-740] ORF |
| 123 | UCAGGAUUUCGACUUGUUAAGAA | UUCUUAACAAGUCGAAAUCCUGA | | [717-739] ORF |
| 124 | CUCAGGAUUUCGACUUGUUAAGA | UCUUAACAAGUCGAAAUCCUGAG | | [716-738] ORF |
| 125 | GCUCAGGAUUUCGACUUGUUAAG | CUUAACAAGUCGAAAUCCUGAGC | | [715-737] ORF |
| 126 | AGCUCAGGAUUUCGACUUGUUAA | UUAACAAGUCGAAAUCCUGAGCU | | [714-736] ORF |
| 127 | AUGCACGUGAACUUGGAAAUUGA | UCAAUUUCCAAGUUCACGUGCAU | Dog, Chin, GP, Rat | [525-547] ORF |
| 128 | GUGUGAUCCUGUUACUGAUACUA | UAGUAUCAGUAACAGGAUCACAC | | [2188-2210] 3′UTR |
| 129 | GGUGUGAUCCUGUUACUGAUACU | AGUAUCAGUAACAGGAUCACACC | | [2187-2209] 3′UTR |
| 130 | AGGUGUGAUCCUGUUACUGAUAC | GUAUCAGUAACAGGAUCACACCU | | [2186-2208] 3′UTR |
| 131 | CAGGUGUGAUCCUGUUACUGAUA | UAUCAGUAACAGGAUCACACCUG | | [2185-2207] 3′UTR |
| 132 | ACAGGUGUGAUCCUGUUACUGAU | AUCAGUAACAGGAUCACACCUGU | | [2184-2206] 3′UTR |
| 133 | CAGUAUUACAUGUGCUUAAUCUC | GAGAUUAAGCACAUGUAAUACUG | | [1663-1685] 3′UTR |
| 134 | UCAGUAUUACAUGUGCUUAAUCU | AGAUUAAGCACAUGUAAUACUGA | | [1662-1684] 3′UTR |
| 135 | UUCAGUAUUACAUGUGCUUAAUC | GAUUAAGCACAUGUAAUACUGAA | | [1661-1683] 3′UTR |
| 136 | UUUCAGUAUUACAUGUGCUUAAU | AUUAAGCACAUGUAAUACUGAAA | | [1660-1682] 3′UTR |
| 137 | UUUUCAGUAUUACAUGUGCUUAA | UUAAGCACAUGUAAUACUGAAAA | | [1659-1681] 3′UTR |
| 138 | CCACCUGCCCUAAAUAAGAAACC | GGUUUCUUAUUUAGGGCAGGUGG | | [868-890] 3′UTR |
| 139 | CCCACCUGCCCUAAAUAAGAAAC | GUUUCUUAUUUAGGGCAGGUGGG | | [867-889] 3′UTR |
| 140 | CCCCACCUGCCCUAAAUAAGAAA | UUUCUUAUUUAGGGCAGGUGGGG | | [866-888] 3′UTR |
| 141 | GCCCCACCUGCCCUAAAUAAGAA | UUCUUAUUUAGGGCAGGUGGGGC | | [865-887] 3′UTR |
| 142 | UGCCCCACCUGCCCUAAAUAAGA | UCUUAUUUAGGGCAGGUGGGGCA | | [864-886] 3′UTR |
| 143 | GGUAAGAGUAAAUGAGAAAUAUU | AAUAUUUCUCAUUUACUCUUACC | | [1329-1351] 3′UTR |
| 144 | GGAGAACUGUCUGUCCAAAUCAA | UUGAUUUGGACAGACAGUUCUCC | Dog, Chimp | [386-408] ORF |
| 145 | UGGAGAACUGUCUGUCCAAAUCA | UGAUUUGGACAGACAGUUCUCCA | Dog, Chimp | [385-407] ORF |
| 146 | CUGGAGAACUGUCUGUCCAAAUC | GAUUUGGACAGACAGUUCUCCAG | Dog, Chimp | [384-406] ORF |
| 147 | GCUGGAGAACUGUCUGUCCAAAU | AUUUGGACAGACAGUUCUCCAGC | Dog, Chimp | [383-405] ORF |
| 148 | UGCUGGAGAACUGUCUGUCCAAA | UUUGGACAGACAGUUCUCCAGCA | Dog, Chimp | [382-404] ORF |
| 149 | CGAGGUAAUAUUUGAGGAAUCAA | UUGAUUCCUCAAAUAUUACCUCG | Chimp | [338-360] ORF |
| 150 | ACGAGGUAAUAUUUGAGGAAUCA | UGAUUCCUCAAAUAUUACCUCGU | Chimp | [337-359] ORF |
| 151 | AACGAGGUAAUAUUUGAGGAAUC | GAUUCCUCAAAUAUUACCUCGUU | Chimp | [336-358] ORF |
| 152 | CAACGAGGUAAUAUUUGAGGAAU | AUUCCUCAAAUAUUACCUCGUUG | Chimp | [335-357] ORF |
| 153 | UCAACGAGGUAAUAUUUGAGGAA | UUCCUCAAAUAUUACCUCGUUGA | Chimp | [334-356] ORF |
| 154 | GCUUGGAAAGAUACUACAAAGCC | GGCUUUGUAGUAUCUUUCCAAGC | | [2274-2296] 3′UTR |
| 155 | UGCUUGGAAAGAUACUACAAAGC | GCUUUGUAGUAUCUUUCCAAGCA | | [2273-2295] 3′UTR |
| 156 | AUGCUUGGAAAGAUACUACAAAG | CUUUGUAGUAUCUUUCCAAGCAU | | [2272-2294] 3′UTR |
| 157 | AAUGCUUGGAAAGAUACUACAAA | UUUGUAGUAUCUUUCCAAGCAUU | | [2271-2293] 3′UTR |
| 158 | AAAUGCUUGGAAAGAUACUACAA | UUGUAGUAUCUUUCCAAGCAUUU | | [2270-2292] 3′UTR |
| 159 | CUAAAAUGUCACUGUUCAAAUUA | UAAUUUGAACAGUGACAUUUUAG | | [2219-2241] 3′UTR |
| 160 | CCUAAAAUGUCACUGUUCAAAUU | AAUUUGAACAGUGACAUUUUAGG | | [2218-2240] 3′UTR |
| 161 | ACCUAAAAUGUCACUGUUCAAAU | AUUUGAACAGUGACAUUUUAGGU | | [2217-2239] 3′UTR |
| 162 | GACCUAAAAUGUCACUGUUCAAA | UUUGAACAGUGACAUUUUAGGUC | | [2216-2238] 3′UTR |
| 163 | UGACCUAAAAUGUCACUGUUCAA | UUGAACAGUGACAUUUUAGGUCA | | [2215-2237] 3′UTR |
| 164 | GUGACUUCCUCACUCUAAUGUUU | AAACAUUAGAGUGAGGAAGUCAC | | [1385-1407] 3′UTR |
| 165 | GGUGACUUCCUCACUCUAAUGUU | AACAUUAGAGUGAGGAAGUCACC | | [1384-1406] 3′UTR |
| 166 | UGGUGACUUCCUCACUCUAAUGU | ACAUUAGAGUGAGGAAGUCACCA | | [1383-1405] 3′UTR |
| 167 | UUGGUGACUUCCUCACUCUAAUG | CAUUAGAGUGAGGAAGUCACCAA | | [1382-1404] 3′UTR |
| 168 | CUUGGUGACUUCCUCACUCUAAU | AUUAGAGUGAGGAAGUCACCAAG | | [1381-1403] 3′UTR |
| 169 | GAAUGGGAUGGAAUAGGUAAGCA | UGCUUACCUAUUCCAUCCCAUUC | | [1025-1047] 3′UTR |
| 170 | UGAAUGGGAUGGAAUAGGUAAGC | GCUUACCUAUUCCAUCCCAUUCA | | [1024-1046] 3′UTR |
| 171 | UUGAAUGGGAUGGAAUAGGUAAG | CUUACCUAUUCCAUCCCAUUCAA | | [1023-1045] 3′UTR |
| 172 | AUUGAAUGGGAUGGAAUAGGUAA | UUACCUAUUCCAUCCCAUUCAAU | | [1022-1044] 3′UTR |
| 173 | AAUUGAAUGGGAUGGAAUAGGUA | UACCUAUUCCAUCCCAUUCAAUU | | [1021-1043] 3′UTR |
| 174 | GCCUGUUAUGCUUACAAAAUGGU | ACCAUUUUGUAAGCAUAACAGGC | | [2479-2501] 3′UTR |
| 175 | UGCCUGUUAUGCUUACAAAAUGG | CCAUUUUGUAAGCAUAACAGGCA | | [2478-2500] 3′UTR |
| 176 | UUGCCUGUUAUGCUUACAAAAUG | CAUUUUGUAAGCAUAACAGGCAA | | [2477-2499] 3′UTR |
| 177 | CUUGCCUGUUAUGCUUACAAAAU | AUUUUGUAAGCAUAACAGGCAAG | | [2476-2498] 3′UTR |
| 178 | UCUUGCCUGUUAUGCUUACAAAA | UUUUGUAAGCAUAACAGGCAAGA | | [2475-2497] 3′UTR |
| 179 | AGGUAGGCUUGGUAAUAGACUAU | AUAGUCUAUUACCAAGCCUACCU | | [1097-1119] 3′UTR |
| 180 | CAGGUAGGCUUGGUAAUAGACUA | UAGUCUAUUACCAAGCCUACCUG | | [1096-1118] 3′UTR |
| 181 | UCAGGUAGGCUUGGUAAUAGACU | AGUCUAUUACCAAGCCUACCUGA | | [1095-1117] 3′UTR |
| 182 | UUCAGGUAGGCUUGGUAAUAGAC | GUCUAUUACCAAGCCUACCUGAA | | [1094-1116] 3′UTR |
| 183 | UUUCAGGUAGGCUUGGUAAUAGA | UCUAUUACCAAGCCUACCUGAAA | | [1093-1115] 3′UTR |
| 184 | GAUGAAUACCUGUGAGGAUAGGA | UCCUAUCCUCACAGGUAUUCAUC | | [1585-1607] 3′UTR |
| 185 | UGAUGAAUACCUGUGAGGAUAGG | CCUAUCCUCACAGGUAUUCAUCA | | [1584-1606] 3′UTR |
| 186 | AUGAUGAAUACCUGUGAGGAUAG | CUAUCCUCACAGGUAUUCAUCAU | | [1583-1605] 3′UTR |
| 187 | AAUGAUGAAUACCUGUGAGGAUA | UAUCCUCACAGGUAUUCAUCAUU | | [1582-1604] 3′UTR |
| 188 | CUGUCACUAGGGAAUAAUAAAGG | CCUUUAUUAUUCCCUAGUGACAG | | [1929-1951] 3′UTR |
| 189 | CCUGUCACUAGGGAAUAAUAAAG | CUUUAUUAUUCCCUAGUGACAGG | | [1928-1950] 3′UTR |
| 190 | ACCUGUCACUAGGGAAUAAUAAA | UUUAUUAUUCCCUAGUGACAGGU | | [1927-1949] 3′UTR |
| 191 | UACCUGUCACUAGGGAAUAAUAA | UUAUUAUUCCCUAGUGACAGGUA | | [1926-1948] 3′UTR |
| 192 | AUACCUGUCACUAGGGAAUAAUA | UAUUAUUCCCUAGUGACAGGUAU | | [1925-1947] 3′UTR |
| 193 | GUUUUAAAGAGGCAACAAAAGCU | AGCUUUUGUUGCCUCUUUAAAAC | | [1404-1426] 3′UTR |
| 194 | UGUUUUAAAGAGGCAACAAAAGC | GCUUUUGUUGCCUCUUUAAAACA | | [1403-1425] 3′UTR |
| 195 | AUGUUUUAAAGAGGCAACAAAAG | CUUUUGUUGCCUCUUUAAAACAU | | [1402-1424] 3′UTR |
| 196 | AAUGUUUUAAAGAGGCAACAAAA | UUUUGUUGCCUCUUUAAAACAUU | | [1401-1423] 3′UTR |
| 197 | UAAUGUUUUAAAGAGGCAACAAA | UUUGUUGCCUCUUUAAAACAUUA | | [1400-1422] 3′UTR |
| 198 | GUGUUCUAACAAACUAAACUCUU | AAGAGUUUAGUUUGUUAGAACAC | | [2246-2268] 3′UTR |
| 199 | AGUGUUCUAACAAACUAAACUCU | AGAGUUUAGUUUGUUAGAACACU | | [2245-2267] 3′UTR |
| 200 | GCUUGGUAAUAGACUAUAUAAAC | GUUUAUAUAGUCUAUUACCAAGC | | [1103-1125] 3′UTR |
| 201 | GGCUUGGUAAUAGACUAUAUAAA | UUUAUAUAGUCUAUUACCAAGCC | | [1102-1124] 3′UTR |
| 202 | AGGCUUGGUAAUAGACUAUAUAA | UUAUAUAGUCUAUUACCAAGCCU | | [1101-1123] 3′UTR |
| 203 | UAGGCUUGGUAAUAGACUAUAUA | UAUAUAGUCUAUUACCAAGCCUA | | [1100-1122] 3′UTR |
| 204 | GUAGGCUUGGUAAUAGACUAUAU | AUAUAGUCUAUUACCAAGCCUAC | | [1099-1121] 3′UTR |
| 205 | CAUCCUGGUGUUACUGAAAAACA | UGUUUUUCAGUAACACCAGGAUG | | [2164-2186] 3′UTR |
| 206 | UCAUCCUGGUGUUACUGAAAAAC | GUUUUUCAGUAACACCAGGAUGA | | [2163-2185] 3′UTR |
| 207 | UUCAUCCUGGUGUUACUGAAAAA | UUUUUCAGUAACACCAGGAUGAA | | [2162-2184] 3′UTR |
| 208 | AUUCAUCCUGGUGUUACUGAAAA | UUUUCAGUAACACCAGGAUGAAU | | [2161-2183] 3′UTR |
| 209 | UAUUCAUCCUGGUGUUACUGAAA | UUUCAGUAACACCAGGAUGAAUA | | [2160-2182] 3′UTR |
| 210 | GCCUAUCAAAACUUCCAAAAGCC | GGCUUUUGGAAGUUUUGAUAGGC | | [1218-1240] 3′UTR |
| 211 | AGCCUAUCAAAACUUCCAAAAGC | GCUUUUGGAAGUUUUGAUAGGCU | | [1217-1239] 3′UTR |
| 212 | UAGCCUAUCAAAACUUCCAAAAG | CUUUUGGAAGUUUUGAUAGGCUA | | [1216-1238] 3′UTR |
| 213 | UUAGCCUAUCAAAACUUCCAAAA | UUUUGGAAGUUUUGAUAGGCUAA | | [1215-1237] 3′UTR |
| 214 | UUUAGCCUAUCAAAACUUCCAAA | UUUGGAAGUUUUGAUAGGCUAAA | | [1214-1236] 3′UTR |
| 215 | UCCUGGUGUUACUGAAAAACAGG | CCUGUUUUUCAGUAACACCAGGA | | [2166-2188] 3′UTR |
| 216 | AUCCUGGUGUUACUGAAAAACAG | CUGUUUUUCAGUAACACCAGGAU | | [2165-2187] 3′UTR |
| 217 | CCACGGUGUUGUUUUAGAUGCCU | AGGCAUCUAAAACAACACCGUGG | | [1446-1468] 3′UTR |
| 218 | ACCACGGUGUUGUUUUAGAUGCC | GGCAUCUAAAACAACACCGUGGU | | [1445-1467] 3′UTR |
| 219 | AACCACGGUGUUGUUUUAGAUGC | GCAUCUAAAACAACACCGUGGUU | | [1444-1466] 3′UTR |
| 220 | UAACCACGGUGUUGUUUUAGAUG | CAUCUAAAACAACACCGUGGUUA | | [1443-1465] 3′UTR |
| 221 | GUAACCACGGUGUUGUUUUAGAU | AUCUAAAACAACACCGUGGUUAC | | [1442-1464] 3′UTR |
| 222 | ACAAAAUGGUGAUGGCUUAUGGA | UCCAUAAGCCAUCACCAUUUUGU | | [2492-2514] 3′UTR |
| 223 | UACAAAAUGGUGAUGGCUUAUGG | CCAUAAGCCAUCACCAUUUUGUA | | [2491-2513] 3′UTR |
| 224 | UUACAAAAUGGUGAUGGCUUAUG | CAUAAGCCAUCACCAUUUUGUAA | | [2490-2512] 3′UTR |
| 225 | CUUACAAAAUGGUGAUGGCUUAU | AUAAGCCAUCACCAUUUUGUAAG | | [2489-2511] 3′UTR |
| 226 | GCUUACAAAAUGGUGAUGGCUUA | UAAGCCAUCACCAUUUUGUAAGC | | [2488-2510] 3′UTR |
| 227 | GCAGUUUGAGCAGCAAGAACCCG | CGGGUUCUUGCUGCUCAAACUGC | Chimp | [217-239] ORF |
| 228 | GGCAGUUUGAGCAGCAAGAACCC | GGGUUCUUGCUGCUCAAACUGCC | Chimp | [216-238] ORF |
| 229 | UGGCAGUUUGAGCAGCAAGAACC | GGUUCUUGCUGCUCAAACUGCCA | Chimp | [215-237] ORF |
| 230 | CUGGCAGUUUGAGCAGCAAGAAC | GUUCUUGCUGCUCAAACUGCCAG | Chimp | [214-236] ORF |
| 231 | ACUGGCAGUUUGAGCAGCAAGAA | UUCUUGCUGCUCAAACUGCCAGU | Chimp | [213-235] ORF |
| 232 | CUUGGAAAGAUACUACAAAGCCA | UGGCUUUGUAGUAUCUUUCCAAG | | [2275-2297] 3′UTR |
| 233 | GUGUGAUUCUAGCGUCGUACCUA | UAGGUACGACGCUAGAAUCACAC | | [578-600] ORF |
| 234 | UGUGUGAUUCUAGCGUCGUACCU | AGGUACGACGCUAGAAUCACACA | | [577-599] ORF |
| 235 | GUGUGUGAUUCUAGCGUCGUACC | GGUACGACGCUAGAAUCACACAC | | [576-598] ORF |
| 236 | UGUGUGUGAUUCUAGCGUCGUAC | GUACGACGCUAGAAUCACACACA | | [575-597] ORF |
| 237 | UUGUGUGUGAUUCUAGCGUCGUA | UACGACGCUAGAAUCACACACAA | | [574-596] ORF |
| 238 | CUUGGGCAUCGAUGUAGAACUGU | ACAGUUCUACAUCGAUGCCCAAG | | [2419-2441] 3′UTR |
| 239 | UCUUGGGCAUCGAUGUAGAACUG | CAGUUCUACAUCGAUGCCCAAGA | | [2418-2440] 3′UTR |
| 240 | UUCUUGGGCAUCGAUGUAGAACU | AGUUCUACAUCGAUGCCCAAGAA | | [2417-2439] 3′UTR |
| 241 | CUUCUUGGGCAUCGAUGUAGAAC | GUUCUACAUCGAUGCCCAAGAAG | | [2416-2438] 3′UTR |
| 242 | GCUUCUUGGGCAUCGAUGUAGAA | UUCUACAUCGAUGCCCAAGAAGC | | [2415-2437] 3′UTR |
| 243 | CUCUGGGCUUUUCUGGGAAUUGA | UCAAUUCCCAGAAAAGCCCAGAG | | [1721-1743] 3′UTR |
| 244 | AACUGUCUGUCCAAAUCAAAGCA | UGCUUUGAUUUGGACAGACAGUU | Dog, Chimp | [390-412] ORF |
| 245 | GAACUGUCUGUCCAAAUCAAAGC | GCUUUGAUUUGGACAGACAGUUC | Dog, Chimp | [389-411] ORF |
| 246 | AGAACUGUCUGUCCAAAUCAAAG | CUUUGAUUUGGACAGACAGUUCU | Dog, Chimp | [388-410] ORF |
| 247 | GAGAACUGUCUGUCCAAAUCAAA | UUUGAUUUGGACAGACAGUUCUC | Dog, Chimp | [387-409] ORF |
| 248 | GAAGGGUCCUAAAAAGGGAAAAU | AUUUUCCCUUUUUAGGACCCUUC | | [774-796] ORF + 3′UTR |
| 249 | UGAAGGGUCCUAAAAAGGGAAAA | UUUUCCCUUUUUAGGACCCUUCA | | [773-795] ORF + 3′UTR |
| 250 | UUGAAGGGUCCUAAAAAGGGAAA | UUUCCCUUUUUAGGACCCUUCAA | | [772-794] ORF + 3′UTR |
| 251 | AUUGAAGGGUCCUAAAAAGGGAA | UUCCCUUUUUAGGACCCUUCAAU | | [771-793] ORF + 3′UTR |
| 252 | AAAGCUUAACCCUAGGUAAGAGU | ACUCUUACCUAGGGUUAAGCUUU | | [1315-1337] 3′UTR |
| 253 | UAAAGCUUAACCCUAGGUAAGAG | CUCUUACCUAGGGUUAAGCUUUA | | [1314-1336] 3′UTR |
| 254 | UUAAAGCUUAACCCUAGGUAAGA | UCUUACCUAGGGUUAAGCUUUAA | | [1313-1335] 3′UTR |
| 255 | AUUAAAGCUUAACCCUAGGUAAG | CUUACCUAGGGUUAAGCUUUAAU | | [1312-1334] 3′UTR |
| 256 | AAUUAAAGCUUAACCCUAGGUAA | UUACCUAGGGUUAAGCUUUAAUU | | [1311-1333] 3′UTR |
| 257 | ACAUGUGCUUAAUCUCAGAUGAA | UUCAUCUGAGAUUAAGCACAUGU | | [1670-1692] 3′UTR |
| 258 | UACAUGUGCUUAAUCUCAGAUGA | UCAUCUGAGAUUAAGCACAUGUA | | [1669-1691] 3′UTR |
| 259 | UUACAUGUGCUUAAUCUCAGAUG | CAUCUGAGAUUAAGCACAUGUAA | | [1668-1690] 3′UTR |
| 260 | AUUACAUGUGCUUAAUCUCAGAU | AUCUGAGAUUAAGCACAUGUAAU | | [1667-1689] 3′UTR |
| 261 | UAUUACAUGUGCUUAAUCUCAGA | UCUGAGAUUAAGCACAUGUAAUA | | [1666-1688] 3′UTR |
| 262 | GAAUCAACUUGCCAGAAUUUGGU | ACCAAAUUCUGGCAAGUUGAUUC | Chimp | [354-376] ORF |
| 263 | GGAAUCAACUUGCCAGAAUUUGG | CCAAAUUCUGGCAAGUUGAUUCC | Chimp | [353-375] ORF |
| 264 | AGGAAUCAACUUGCCAGAAUUUG | CAAAUUCUGGCAAGUUGAUUCCU | Chimp | [352-374] ORF |
| 265 | GAGGAAUCAACUUGCCAGAAUUU | AAAUUCUGGCAAGUUGAUUCCUC | Chimp | [351-373] ORF |
| 266 | UGAGGAAUCAACUUGCCAGAAUU | AAUUCUGGCAAGUUGAUUCCUCA | Chimp | [350-372] ORF |
| 267 | UCCUCACUCUAAUGUUUUAAAGA | UCUUUAAAACAUUAGAGUGAGGA | | [1391-1413] 3′UTR |
| 268 | UUCCUCACUCUAAUGUUUUAAAG | CUUUAAAACAUUAGAGUGAGGAA | | [1390-1412] 3′UTR |
| 269 | CUUCCUCACUCUAAUGUUUUAAA | UUUAAAACAUUAGAGUGAGGAAG | | [1389-1411] 3′UTR |
| 270 | ACUUCCUCACUCUAAUGUUUUAA | UUAAAACAUUAGAGUGAGGAAGU | | [1388-1410] 3′UTR |
| 271 | GACUUCCUCACUCUAAUGUUUUA | UAAAACAUUAGAGUGAGGAAGUC | | [1387-1409] 3′UTR |
| 272 | GAAAGAUACUACAAAGCCAAUCU | AGAUUGGCUUUGUAGUAUCUUUC | | [2279-2301] 3′UTR |
| 273 | GGAAAGAUACUACAAAGCCAAUC | GAUUGGCUUUGUAGUAUCUUUCC | | [2278-2300] 3′UTR |
| 274 | UGGAAAGAUACUACAAAGCCAAU | AUUGGCUUUGUAGUAUCUUUCCA | | [2277-2299] 3′UTR |
| 275 | UUGGAAAGAUACUACAAAGCCAA | UUGGCUUUGUAGUAUCUUUCCAA | | [2276-2298] 3′UTR |
| 276 | AAGGGUUUUUAGACAGGAAGGUA | UACCUUCCUGUCUAAAAACCCUU | | [1269-1291] 3′UTR |
| 277 | GAAGGGUUUUUAGACAGGAAGGU | ACCUUCCUGUCUAAAAACCCUUC | | [1268-1290] 3′UTR |
| 278 | UGAAGGGUUUUUAGACAGGAAGG | CCUUCCUGUCUAAAAACCCUUCA | | [1267-1289] 3′UTR |
| 279 | UUGAAGGGUUUUUAGACAGGAAG | CUUCCUGUCUAAAAACCCUUCAA | | [1266-1288] 3′UTR |
| 280 | UUUGAAGGGUUUUUAGACAGGAA | UUCCUGUCUAAAAACCCUUCAAA | | [1265-1287] 3′UTR |
| 281 | GUAUUCAUCCUGGUGUUACUGAA | UUCAGUAACACCAGGAUGAAUAC | | [2159-2181] 3′UTR |
| 282 | CCUGUUACUGAUACUAUAAGUGA | UCACUUAUAGUAUCAGUAACAGG | | [2195-2217] 3′UTR |
| 283 | GGAGAUAUGGUUUAUAGUACAGC | GCUGUACUAUAAACCAUAUCUCC | | [1841-1863] 3′UTR |
| 284 | UGGAGAUAUGGUUUAUAGUACAG | CUGUACUAUAAACCAUAUCUCCA | | [1840-1862] 3′UTR |
| 285 | AUGGAGAUAUGGUUUAUAGUACA | UGUACUAUAAACCAUAUCUCCAU | | [1839-1861] 3′UTR |
| 286 | UAUGGAGAUAUGGUUUAUAGUAC | GUACUAUAAACCAUAUCUCCAUA | | [1838-1860] 3′UTR |
| 287 | CUAUGGAGAUAUGGUUUAUAGUA | UACUAUAAACCAUAUCUCCAUAG | | [1837-1859] 3′UTR |
| 288 | CAUAGAUCCCAUUUUUGUACAGA | UCUGUACAAAAAUGGGAUCUAUG | | [999-1021] 3′UTR |
| 289 | GCAUAGAUCCCAUUUUUGUACAG | CUGUACAAAAAUGGGAUCUAUGC | | [998-1020] 3′UTR |
| 290 | UGCAUAGAUCCCAUUUUUGUACA | UGUACAAAAAUGGGAUCUAUGCA | | [997-1019] 3′UTR |
| 291 | CUGCAUAGAUCCCAUUUUUGUAC | GUACAAAAAUGGGAUCUAUGCAG | | [996-1018] 3′UTR |
| 292 | UCUGCAUAGAUCCCAUUUUUGUA | UACAAAAAUGGGAUCUAUGCAGA | | [995-1017] 3′UTR |
| 293 | GAAUUGAAUGGGAUGGAAUAGGU | ACCUAUUCCAUCCCAUUCAAUUC | | [1020-1042] 3′UTR |
| 294 | AGAAUUGAAUGGGAUGGAAUAGG | CCUAUUCCAUCCCAUUCAAUUCU | | [1019-1041] 3′UTR |
| 295 | CAGAAUUGAAUGGGAUGGAAUAG | CUAUUCCAUCCCAUUCAAUUCUG | | [1018-1040] 3′UTR |
| 296 | ACAGAAUUGAAUGGGAUGGAAUA | UAUUCCAUCCCAUUCAAUUCUGU | | [1017-1039] 3′UTR |
| 297 | CUGUGAGGAUAGGAAAUUAGUUC | GAACUAAUUUCCUAUCCUCACAG | | [1594-1616] 3′UTR |
| 298 | CCUGUGAGGAUAGGAAAUUAGUU | AACUAAUUUCCUAUCCUCACAGG | | [1593-1615] 3′UTR |
| 299 | ACCUGUGAGGAUAGGAAAUUAGU | ACUAAUUUCCUAUCCUCACAGGU | | [1592-1614] 3′UTR |
| 300 | UACCUGUGAGGAUAGGAAAUUAG | CUAAUUUCCUAUCCUCACAGGUA | | [1591-1613] 3′UTR |
| 301 | AUACCUGUGAGGAUAGGAAAUUA | UAAUUUCCUAUCCUCACAGGUAU | | [1590-1612] 3′UTR |
| 302 | ACCCUAGGUAAGAGUAAAUGAGA | UCUCAUUUACUCUUACCUAGGGU | | [1323-1345] 3′UTR |
| 303 | AACCCUAGGUAAGAGUAAAUGAG | CUCAUUUACUCUUACCUAGGGUU | | [1322-1344] 3′UTR |
| 304 | UAACCCUAGGUAAGAGUAAAUGA | UCAUUUACUCUUACCUAGGGUUA | | [1321-1343] 3′UTR |
| 305 | UCAAAUGCUUGGAAAGAUACUAC | GUAGUAUCUUUCCAAGCAUUUGA | | [2268-2290] 3′UTR |
| 306 | UUCAAAUGCUUGGAAAGAUACUA | UAGUAUCUUUCCAAGCAUUUGAA | | [2267-2289] 3′UTR |
| 307 | CUUCAAAUGCUUGGAAAGAUACU | AGUAUCUUUCCAAGCAUUUGAAG | | [2266-2288] 3′UTR |
| 308 | UCUUCAAAUGCUUGGAAAGAUAC | GUAUCUUUCCAAGCAUUUGAAGA | | [2265-2287] 3′UTR |
| 309 | CUCUUCAAAUGCUUGGAAAGAUA | UAUCUUUCCAAGCAUUUGAAGAG | | [2264-2286] 3′UTR |
| 310 | GGAGAAGUGAUUCAAAAUAGUGU | ACACUAUUUUGAAUCACUUCUCC | | [966-988] 3′UTR |
| 311 | UGGAGAAGUGAUUCAAAAUAGUG | CACUAUUUUGAAUCACUUCUCCA | | [965-987] 3′UTR |
| 312 | UUGGAGAAGUGAUUCAAAAUAGU | ACUAUUUUGAAUCACUUCUCCAA | | [964-986] 3′UTR |
| 313 | UUUGGAGAAGUGAUUCAAAAUAG | CUAUUUUGAAUCACUUCUCCAAA | | [963-985] 3′UTR |
| 314 | CUUUGGAGAAGUGAUUCAAAAUA | UAUUUUGAAUCACUUCUCCAAAG | | [962-984] 3′UTR |
| 315 | CGUGGAUAAGGAGCUUAUUCAGG | CCUGAAUAAGCUCCUUAUCCACG | | [2078-2100] 3′UTR |
| 316 | UCGUGGAUAAGGAGCUUAUUCAG | CUGAAUAAGCUCCUUAUCCACGA | | [2077-2099] 3′UTR |
| 317 | GUCGUGGAUAAGGAGCUUAUUCA | UGAAUAAGCUCCUUAUCCACGAC | | [2076-2098] 3′UTR |
| 318 | GGUCGUGGAUAAGGAGCUUAUUC | GAAUAAGCUCCUUAUCCACGACC | | [2075-2097] 3′UTR |
| 319 | GGGUCGUGGAUAAGGAGCUUAUU | AAUAAGCUCCUUAUCCACGACCC | | [2074-2096] 3′UTR |
| 320 | CCAGAUUUGCCUAUUUUGAUUUU | AAAAUCAAAAUAGGCAAAUCUGG | | [1125-1147] 3′UTR |
| 321 | ACCAGAUUUGCCUAUUUUGAUUU | AAAUCAAAAUAGGCAAAUCUGGU | | [1124-1146] 3′UTR |
| 322 | AACCAGAUUUGCCUAUUUUGAUU | AAUCAAAAUAGGCAAAUCUGGUU | | [1123-1145] 3′UTR |
| 323 | AAACCAGAUUUGCCUAUUUUGAU | AUCAAAAUAGGCAAAUCUGGUUU | | [1122-1144] 3′UTR |
| 324 | UAAACCAGAUUUGCCUAUUUUGA | UCAAAAUAGGCAAAUCUGGUUUA | | [1121-1143] 3′UTR |
| 325 | CCUUUGGAGAAGUGAUUCAAAAU | AUUUUGAAUCACUUCUCCAAAGG | | [961-983] 3′UTR |
| 326 | GCCUUUGGAGAAGUGAUUCAAAA | UUUUGAAUCACUUCUCCAAAGGC | | [960-982] 3′UTR |
| 327 | UUGAGGAAUCAACUUGCCAGAAU | AUUCUGGCAAGUUGAUUCCUCAA | Chimp | [349-371] ORF |
| 328 | UUUGAGGAAUCAACUUGCCAGAA | UUCUGGCAAGUUGAUUCCUCAAA | Chimp | [348-370] ORF |
| 329 | AUUUGAGGAAUCAACUUGCCAGA | UCUGGCAAGUUGAUUCCUCAAAU | Chimp | [347-369] ORF |
| 330 | GAGAAAUAUUACGGCAAUAAUGG | CCAUUAUUGCCGUAAUAUUUCUC | | [1342-1364] 3′UTR |
| 331 | UGAGAAAUAUUACGGCAAUAAUG | CAUUAUUGCCGUAAUAUUUCUCA | | [1341-1363] 3′UTR |
| 332 | AUGAGAAAUAUUACGGCAAUAAU | AUUAUUGCCGUAAUAUUUCUCAU | | [1340-1362] 3′UTR |
| 333 | AAUGAGAAAUAUUACGGCAAUAA | UUAUUGCCGUAAUAUUUCUCAUU | | [1339-1361] 3′UTR |
| 334 | AAAUGAGAAAUAUUACGGCAAUA | UAUUGCCGUAAUAUUUCUCAUUU | | [1338-1360] 3′UTR |
| 335 | UACAGAAUUGAAUGGGAUGGAAU | AUUCCAUCCCAUUCAAUUCUGUA | | [1016-1038] 3′UTR |
| 336 | GUACAGAAUUGAAUGGGAUGGAA | UUCCAUCCCAUUCAAUUCUGUAC | | [1015-1037] 3′UTR |
| 337 | AUGGAAUAGGUAAGCAAAAGUAG | CUACUUUUGCUUACCUAUUCCAU | | [1032-1054] 3′UTR |
| 338 | GUAAAAAGCUGGAUAGGAUUGUG | CACAAUCCUAUCCAGCUUUUUAC | Chin, GP, Chimp, Rat, Ms | [556-578] ORF |
| 339 | UGUAAAAAGCUGGAUAGGAUUGU | ACAAUCCUAUCCAGCUUUUUACA | Chin, GP, Chimp, Rat, Ms | [555-577] ORF |
| 340 | AUGUAAAAAGCUGGAUAGGAUUG | CAAUCCUAUCCAGCUUUUUACAU | Chin, GP, Chimp, Rat, Ms | [554-576] ORF |
| 341 | UAUGUAAAAAGCUGGAUAGGAUU | AAUCCUAUCCAGCUUUUUACAUA | Chin, GP, Chimp, Rat, Ms | [553-575] ORF |
| 342 | GUAUGUAAAAAGCUGGAUAGGAU | AUCCUAUCCAGCUUUUUACAUAC | Chin, GP, Chimp, Rat, Ms | [552-574] ORF |
| 343 | CCACCAGUUCCUGACUCAAAUUU | AAAUUUGAGUCAGGAACUGGUGG | | [1245-1267] 3′UTR |
| 344 | ACCACCAGUUCCUGACUCAAAUU | AAUUUGAGUCAGGAACUGGUGGU | | [1244-1266] 3′UTR |
| 345 | CACCACCAGUUCCUGACUCAAAU | AUUUGAGUCAGGAACUGGUGGUG | | [1243-1265] 3′UTR |
| 346 | ACACCACCAGUUCCUGACUCAAA | UUUGAGUCAGGAACUGGUGGUGU | | [1242-1264] 3′UTR |
| 347 | CACACCACCAGUUCCUGACUCAA | UUGAGUCAGGAACUGGUGGUGUG | | [1241-1263] 3′UTR |
| 348 | CAAAUUAGCCAGUGUUCUAACAA | UUGUUAGAACACUGGCUAAUUUG | | [2235-2257] 3′UTR |
| 349 | UCAAAUUAGCCAGUGUUCUAACA | UGUUAGAACACUGGCUAAUUUGA | | [2234-2256] 3′UTR |
| 350 | UUCAAAUUAGCCAGUGUUCUAAC | GUUAGAACACUGGCUAAUUUGAA | | [2233-2255] 3′UTR |
| 351 | GUUCAAAUUAGCCAGUGUUCUAA | UUAGAACACUGGCUAAUUUGAAC | | [2232-2254] 3′UTR |
| 352 | UGUUCAAAUUAGCCAGUGUUCUA | UAGAACACUGGCUAAUUUGAACA | | [2231-2253] 3′UTR |
| 353 | CACCUGCCCUAAAUAAGAAACCC | GGGUUUCUUAUUUAGGGCAGGUG | | [869-891] 3′UTR |
| 354 | CUCACUGAUUGGAACAACAGUGA | UCACUGUUGUUCCAAUCAGUGAG | | [749-771] ORF |
| 355 | ACUCACUGAUUGGAACAACAGUG | CACUGUUGUUCCAAUCAGUGAGU | | [748-770] ORF |
| 356 | UACUCACUGAUUGGAACAACAGU | ACUGUUGUUCCAAUCAGUGAGUA | | [747-769] ORF |
| 357 | UUACUCACUGAUUGGAACAACAG | CUGUUGUUCCAAUCAGUGAGUAA | | [746-768] ORF |
| 358 | UUUACUCACUGAUUGGAACAACA | UGUUGUUCCAAUCAGUGAGUAAA | | [745-767] ORF |
| 359 | AUGCUGGAGAACUGUCUGUCCAA | UUGGACAGACAGUUCUCCAGCAU | Dog, GP, Chimp, Rat | [381-403] ORF |
| 360 | UUUAUAGAAUUGGGCCAAGAUAA | UUAUCUUGGCCCAAUUCUAUAAA | | [2301-2323] 3′UTR |
| 361 | ACUCUUCAAAUGCUUGGAAAGAU | AUCUUUCCAAGCAUUUGAAGAGU | | [2263-2285] 3′UTR |
| 362 | AACUCUUCAAAUGCUUGGAAAGA | UCUUUCCAAGCAUUUGAAGAGUU | | [2262-2284] 3′UTR |
| 363 | AAACUCUUCAAAUGCUUGGAAAG | CUUUCCAAGCAUUUGAAGAGUUU | | [2261-2283] 3′UTR |
| 364 | UAAACUCUUCAAAUGCUUGGAAA | UUUCCAAGCAUUUGAAGAGUUUA | | [2260-2282] 3′UTR |
| 365 | UCUUGGUGACUUCCUCACUCUAA | UUAGAGUGAGGAAGUCACCAAGA | | [1380-1402] 3′UTR |
| 366 | GAGAACUGCUCAUGGACUAGCUU | AAGCUAGUCCAUGAGCAGUUCUC | Dog, Chimp | [630-652] ORF |
| 367 | GGAGAACUGCUCAUGGACUAGCU | AGCUAGUCCAUGAGCAGUUCUCC | Dog, Chimp | [629-651] ORF |
| 368 | AGGAGAACUGCUCAUGGACUAGC | GCUAGUCCAUGAGCAGUUCUCCU | Dog, Chimp | [628-650] ORF |
| 369 | CAGGAGAACUGCUCAUGGACUAG | CUAGUCCAUGAGCAGUUCUCCUG | Dog, Chimp | [627-649] ORF |
| 370 | GCAGGAGAACUGCUCAUGGACUA | UAGUCCAUGAGCAGUUCUCCUGC | Dog, Chimp | [626-648] ORF |
| 371 | UGUGGGUCGUGGAUAAGGAGCUU | AAGCUCCUUAUCCACGACCCACA | | [2071-2093] 3′UTR |
| 372 | CUGUGGGUCGUGGAUAAGGAGCU | AGCUCCUUAUCCACGACCCACAG | | [2070-2092] 3′UTR |
| 373 | GCUGUGGGUCGUGGAUAAGGAGC | GCUCCUUAUCCACGACCCACAGC | | [2069-2091] 3′UTR |
| 374 | GUGACCUAAAAUGUCACUGUUCA | UGAACAGUGACAUUUUAGGUCAC | | [2214-2236] 3′UTR |
| 375 | GAGAAACUGACCCAGAGAAUUGC | GCAAUUCUCUGGGUCAGUUUCUC | Chin, GP, Chimp, Rat, Ms | [447-469] ORF |
| 376 | UGAGAAACUGACCCAGAGAAUUG | CAAUUCUCUGGGUCAGUUUCUCA | Chin, GP, Chimp, Rat, Ms | [446-468] ORF |
| 377 | CUGAGAAACUGACCCAGAGAAUU | AAUUCUCUGGGUCAGUUUCUCAG | Chin, GP, Chimp, Rat, Ms | [445-467] ORF |
| 378 | CCUGAGAAACUGACCCAGAGAAU | AUUCUCUGGGUCAGUUUCUCAGG | Chin, GP, Chimp, Rat, Ms | [444-466] ORF |
| 379 | CCCUGAGAAACUGACCCAGAGAA | UUCUCUGGGUCAGUUUCUCAGGG | Chin, GP, Chimp, Rat, Ms | [443-465] ORF |
| 380 | CACCAGUUCCUGACUCAAAUUUG | CAAAUUUGAGUCAGGAACUGGUG | | [1246-1268] 3′UTR |
| 381 | UCAAAGGUCCUUGUCCCUGAGAA | UUCUCAGGGACAAGGACCUUUGA | Chimp | [429-451] ORF |
| 382 | CUCAAAGGUCCUUGUCCCUGAGA | UCUCAGGGACAAGGACCUUUGAG | Chimp | [428-450] ORF |
| 383 | GCUCAAAGGUCCUUGUCCCUGAG | CUCAGGGACAAGGACCUUUGAGC | Chimp | [427-449] ORF |
| 384 | UGCUCAAAGGUCCUUGUCCCUGA | UCAGGGACAAGGACCUUUGAGCA | Chimp | [426-448] ORF |
| 385 | GAUUUCGACUUGUUAAGAAAAAA | UUUUUUCUUAACAAGUCGAAAUC | Rat | [721-743] ORF |
| 386 | GGAUUUCGACUUGUUAAGAAAAA | UUUUUCUUAACAAGUCGAAAUCC | Rat | [720-742] ORF |
| 387 | AGGAUUUCGACUUGUUAAGAAAA | UUUUCUUAACAAGUCGAAAUCCU | Rat | [719-741] ORF |
| 388 | UGAGUGAAUGAUGAAUACCUGUG | CACAGGUAUUCAUCAUUCACUCA | | [1576-1598] 3′UTR |
| 389 | UUGAGUGAAUGAUGAAUACCUGU | ACAGGUAUUCAUCAUUCACUCAA | | [1575-1597] 3′UTR |
| 390 | AUUGAGUGAAUGAUGAAUACCUG | CAGGUAUUCAUCAUUCACUCAAU | | [1574-1596] 3′UTR |
| 391 | CAUUGAGUGAAUGAUGAAUACCU | AGGUAUUCAUCAUUCACUCAAUG | | [1573-1595] 3′UTR |
| 392 | CAAUAAUGGAACUGCUUCACUGU | ACAGUGAAGCAGUUCCAUUAUUG | | [1356-1378] 3′UTR |
| 393 | GCAAUAAUGGAACUGCUUCACUG | CAGUGAAGCAGUUCCAUUAUUGC | | [1355-1377] 3′UTR |
| 394 | GGCAAUAAUGGAACUGCUUCACU | AGUGAAGCAGUUCCAUUAUUGCC | | [1354-1376] 3′UTR |
| 395 | CGGCAAUAAUGGAACUGCUUCAC | GUGAAGCAGUUCCAUUAUUGCCG | | [1353-1375] 3′UTR |
| 396 | ACGGCAAUAAUGGAACUGCUUCA | UGAAGCAGUUCCAUUAUUGCCGU | | [1352-1374] 3′UTR |
| 397 | CACUAACAGUUAUCUUUGACUCU | AGAGUCAAAGAUAACUGUUAGUG | | [2453-2475] 3′UTR |
| 398 | CCACUAACAGUUAUCUUUGACUC | GAGUCAAAGAUAACUGUUAGUGG | | [2452-2474] 3′UTR |
| 399 | UCCACUAACAGUUAUCUUUGACU | AGUCAAAGAUAACUGUUAGUGGA | | [2451-2473] 3′UTR |
| 400 | UUCCACUAACAGUUAUCUUUGAC | GUCAAAGAUAACUGUUAGUGGAA | | [2450-2472] 3′UTR |
| 401 | UUUCCACUAACAGUUAUCUUUGA | UCAAAGAUAACUGUUAGUGGAAA | | [2449-2471] 3′UTR |
| 402 | GCGUCGUACCUACUUUUGAGCUU | AAGCUCAAAAGUAGGUACGACGC | | [589-611] ORF |
| 403 | AGCGUCGUACCUACUUUUGAGCU | AGCUCAAAAGUAGGUACGACGCU | | [588-610] ORF |
| 404 | UAGCGUCGUACCUACUUUUGAGC | GCUCAAAAGUAGGUACGACGCUA | | [587-609] ORF |
| 405 | CUAGCGUCGUACCUACUUUUGAG | CUCAAAAGUAGGUACGACGCUAG | | [586-608] ORF |
| 406 | UCUAGCGUCGUACCUACUUUUGA | UCAAAAGUAGGUACGACGCUAGA | | [585-607] ORF |
| 407 | CGGCCAGCAUUUCAGAAUUGCUG | CAGCAAUUCUGAAAUGCUGGCCG | Chimp | [238-260] ORF |
| 408 | CCGGCCAGCAUUUCAGAAUUGCU | AGCAAUUCUGAAAUGCUGGCCGG | Chimp | [237-259] ORF |
| 409 | CCCGGCCAGCAUUUCAGAAUUGC | GCAAUUCUGAAAUGCUGGCCGGG | Chimp | [236-258] ORF |
| 410 | ACCCGGCCAGCAUUUCAGAAUUG | CAAUUCUGAAAUGCUGGCCGGGU | Chimp | [235-257] ORF |
| 411 | AACCCGGCCAGCAUUUCAGAAUU | AAUUCUGAAAUGCUGGCCGGGUU | Chimp | [234-256] ORF |
| 412 | GUGCUUAAUCUCAGAUGAACCAU | AUGGUUCAUCUGAGAUUAAGCAC | | [1674-1696] 3′UTR |
| 413 | UGUGCUUAAUCUCAGAUGAACCA | UGGUUCAUCUGAGAUUAAGCACA | | [1673-1695] 3′UTR |
| 414 | AUGUGCUUAAUCUCAGAUGAACC | GGUUCAUCUGAGAUUAAGCACAU | | [1672-1694] 3′UTR |
| 415 | CAUGUGCUUAAUCUCAGAUGAAC | GUUCAUCUGAGAUUAAGCACAUG | | [1671-1693] 3′UTR |
| 416 | GAAUAGGUAAGCAAAAGUAGAAG | CUUCUACUUUUGCUUACCUAUUC | | [1035-1057] 3′UTR |
| 417 | GGAAUAGGUAAGCAAAAGUAGAA | UUCUACUUUUGCUUACCUAUUCC | | [1034-1056] 3′UTR |
| 418 | UGGAAUAGGUAAGCAAAAGUAGA | UCUACUUUUGCUUACCUAUUCCA | | [1033-1055] 3′UTR |
| 419 | GUUGUGUUAUGCACGUGAACUUG | CAAGUUCACGUGCAUAACACAAC | Ms | [517-539] ORF |
| 420 | GGUUGUGUUAUGCACGUGAACUU | AAGUUCACGUGCAUAACACAACC | Ms | [516-538] ORF |
| 421 | AGGUUGUGUUAUGCACGUGAACU | AGUUCACGUGCAUAACACAACCU | Ms | [515-537] ORF |
| 422 | GAGGUUGUGUUAUGCACGUGAAC | GUUCACGUGCAUAACACAACCUC | Ms | [514-536] ORF |
| 423 | CGAGGUUGUGUUAUGCACGUGAA | UUCACGUGCAUAACACAACCUCG | Ms | [513-535] ORF |
| 424 | AGUACAGCCUAGAGAAUGAAACU | AGUUUCAUUCUCUAGGCUGUACU | | [1856-1878] 3′UTR |
| 425 | UAGUACAGCCUAGAGAAUGAAAC | GUUUCAUUCUCUAGGCUGUACUA | | [1855-1877] 3′UTR |
| 426 | AUAGUACAGCCUAGAGAAUGAAA | UUUCAUUCUCUAGGCUGUACUAU | | [1854-1876] 3′UTR |
| 427 | UAUAGUACAGCCUAGAGAAUGAA | UUCAUUCUCUAGGCUGUACUAUA | | [1853-1875] 3′UTR |
| 428 | UUAUAGUACAGCCUAGAGAAUGA | UCAUUCUCUAGGCUGUACUAUAA | | [1852-1874] 3′UTR |
| 429 | ACUGUCUGUCCAAAUCAAAGCAA | UUGCUUUGAUUUGGACAGACAGU | Dog, Chimp | [391-413] ORF |
| 430 | AGCUUACACUUGUGUUUAAGCAG | CUGCUUAAACACAAGUGUAAGCU | Chimp | [607-629] ORF |
| 431 | GAGCUUACACUUGUGUUUAAGCA | UGCUUAAACACAAGUGUAAGCUC | Chimp | [606-628] ORF |
| 432 | UGAGCUUACACUUGUGUUUAAGC | GCUUAAACACAAGUGUAAGCUCA | Chimp | [605-627] ORF |
| 433 | UUGAGCUUACACUUGUGUUUAAG | CUUAAACACAAGUGUAAGCUCAA | Chimp | [604-626] ORF |
| 434 | UUUGAGCUUACACUUGUGUUUAA | UUAAACACAAGUGUAAGCUCAAA | Chimp | [603-625] ORF |
| 435 | GAUUGGGUAGUAAAACUAUUCAG | CUGAAUAGUUUUACUACCCAAUC | | [815-837] 3′UTR |
| 436 | UGAUUGGGUAGUAAAACUAUUCA | UGAAUAGUUUUACUACCCAAUCA | | [814-836] 3′UTR |
| 437 | AUGAUUGGGUAGUAAAACUAUUC | GAAUAGUUUUACUACCCAAUCAU | | [813-835] 3′UTR |
| 438 | CAUGAUUGGGUAGUAAAACUAUU | AAUAGUUUUACUACCCAAUCAUG | | [812-834] 3′UTR |
| 439 | GUGAACUUGGAAAUUGAAAAUGU | ACAUUUUCAAUUUCCAAGUUCAC | Dog, Chin, GP, | [531-553] ORF |
| | | | Chimp, Rat | |
| 440 | GCCAGAAUUUGGUUAAAAUGCUG | CAGCAUUUUAACCAAAUUCUGGC | GP, Chimp, Rat, Ms | [364-386] ORF |
| 441 | UGCCAGAAUUUGGUUAAAAUGCU | AGCAUUUUAACCAAAUUCUGGCA | GP, Chimp, Rat, Ms | [363-385] ORF |
| 442 | UUGCCAGAAUUUGGUUAAAAUGC | GCAUUUUAACCAAAUUCUGGCAA | GP, Chimp, Rat, Ms | [362-384] ORF |
| 443 | CUUGCCAGAAUUUGGUUAAAAUG | CAUUUUAACCAAAUUCUGGCAAG | GP, Chimp, Rat, Ms | [361-383] ORF |
| 444 | ACUUGCCAGAAUUUGGUUAAAAU | AUUUUAACCAAAUUCUGGCAAGU | GP, Chimp, Rat, Ms | [360-382] ORF |
| 445 | AACUGGCAGUUUGAGCAGCAAGA | UCUUGCUGCUCAAACUGCCAGUU | Chimp | [212-234] ORF |
| 446 | CAACUGGCAGUUUGAGCAGCAAG | CUUGCUGCUCAAACUGCCAGUUG | Chimp | [211-233] ORF |
| 447 | GCAACUGGCAGUUUGAGCAGCAA | UUGCUGCUCAAACUGCCAGUUGC | Chimp | [210-232] ORF |
| 448 | GUCACUAGGGAAUAAUAAAGGCC | GGCCUUUAUUAUUCCCUAGUGAC | | [1931-1953] 3′UTR |
| 449 | UGUCACUAGGGAAUAAUAAAGGC | GCCUUUAUUAUUCCCUAGUGACA | | [1930-1952] 3′UTR |
| 450 | AGAUCUAGUCCCUCUCUGAUUCA | UGAAUCAGAGAGGGACUAGAUCU | | [1619-1641] 3′UTR |
| 451 | GAGAUCUAGUCCCUCUCUGAUUC | GAAUCAGAGAGGGACUAGAUCUC | | [1618-1640] 3′UTR |
| 452 | UGAGAUCUAGUCCCUCUCUGAUU | AAUCAGAGAGGGACUAGAUCUCA | | [1617-1639] 3′UTR |
| 453 | CUGAGAUCUAGUCCCUCUCUGAU | AUCAGAGAGGGACUAGAUCUCAG | | [1616-1638] 3′UTR |
| 454 | UCUGAGAUCUAGUCCCUCUCUGA | UCAGAGAGGGACUAGAUCUCAGA | | [1615-1637] 3′UTR |
| 455 | GGCUUCUUGGGCAUCGAUGUAGA | UCUACAUCGAUGCCCAAGAAGCC | | [2414-2436] 3′UTR |
| 456 | CCAGAGAAUUGCUCAAGAUGUCC | GGACAUCUUGAGCAAUUCUCUGG | Chimp, Ms | [458-480] ORF |
| 457 | CCCAGAGAAUUGCUCAAGAUGUC | GACAUCUUGAGCAAUUCUCUGGG | Chimp, Ms | [457-479] ORF |
| 458 | ACCCAGAGAAUUGCUCAAGAUGU | ACAUCUUGAGCAAUUCUCUGGGU | Chimp, Ms | [456-478] ORF |
| 459 | GACCCAGAGAAUUGCUCAAGAUG | CAUCUUGAGCAAUUCUCUGGGUC | Chimp, Ms | [455-477] ORF |
| 460 | UGACCCAGAGAAUUGCUCAAGAU | AUCUUGAGCAAUUCUCUGGGUCA | Chimp, Ms | [454-476] ORF |
| 461 | CCCUGUUCUUAAGUGUUGAAUAC | GUAUUCAACACUUAAGAACAGGG | | [1485-1507] 3′UTR |
| 462 | CCCCUGUUCUUAAGUGUUGAAUA | UAUUCAACACUUAAGAACAGGGG | | [1484-1506] 3′UTR |
| 463 | UCCCCUGUUCUUAAGUGUUGAAU | AUUCAACACUUAAGAACAGGGGA | | [1483-1505] 3′UTR |
| 464 | UUCCCCUGUUCUUAAGUGUUGAA | UUCAACACUUAAGAACAGGGGAA | | [1482-1504] 3′UTR |
| 465 | UUUCCCCUGUUCUUAAGUGUUGA | UCAACACUUAAGAACAGGGGAAA | | [1481-1503] 3′UTR |
| 466 | CUGACCCAGAGAAUUGCUCAAGA | UCUUGAGCAAUUCUCUGGGUCAG | Chimp, Ms | [453-475] ORF |
| 467 | ACUGACCCAGAGAAUUGCUCAAG | CUUGAGCAAUUCUCUGGGUCAGU | Chimp, Ms | [452-474] ORF |
| 468 | AACUGACCCAGAGAAUUGCUCAA | UUGAGCAAUUCUCUGGGUCAGUU | Chimp, Ms | [451-473] ORF |
| 469 | GGCCUUUGGAGAAGUGAUUCAAA | UUUGAAUCACUUCUCCAAAGGCC | | [959-981] 3′UTR |
| 470 | CCAUGGCAGUGUUAUCUCAUCUC | GAGAUGAGAUAACACUGCCAUGG | | [1701-1723] 3′UTR |
| 471 | ACCAUGGCAGUGUUAUCUCAUCU | AGAUGAGAUAACACUGCCAUGGU | | [1700-1722] 3′UTR |
| 472 | CACCAUGGCAGUGUUAUCUCAUC | GAUGAGAUAACACUGCCAUGGUG | | [1699-1721] 3′UTR |
| 473 | UCACCAUGGCAGUGUUAUCUCAU | AUGAGAUAACACUGCCAUGGUGA | | [1698-1720] 3′UTR |
| 474 | UUCACCAUGGCAGUGUUAUCUCA | UGAGAUAACACUGCCAUGGUGAA | | [1697-1719] 3′UTR |
| 475 | CAGCUCAGGAUUUCGACUUGUUA | UAACAAGUCGAAAUCCUGAGCUG | | [713-735] ORF |
| 476 | GACAGGAAGGUAGGAUUAAGUAG | CUACUUAAUCCUACCUUCCUGUC | | [1280-1302] 3′UTR |
| 477 | AGACAGGAAGGUAGGAUUAAGUA | UACUUAAUCCUACCUUCCUGUCU | | [1279-1301] 3′UTR |
| 478 | UAGACAGGAAGGUAGGAUUAAGU | ACUUAAUCCUACCUUCCUGUCUA | | [1278-1300] 3′UTR |
| 479 | UUAGACAGGAAGGUAGGAUUAAG | CUUAAUCCUACCUUCCUGUCUAA | | [1277-1299] 3′UTR |
| 480 | UUUAGACAGGAAGGUAGGAUUAA | UUAAUCCUACCUUCCUGUCUAAA | | [1276-1298] 3′UTR |
| 481 | GGGUCCUAAAAAGGGAAAAUAUA | UAUAUUUUCCCUUUUUAGGACCC | | [777-799] ORF + 3′UTR |
| 482 | AGGGUCCUAAAAAGGGAAAAUAU | AUAUUUUCCCUUUUUAGGACCCU | | [776-798] ORF + 3′UTR |
| 483 | AAGGGUCCUAAAAAGGGAAAAUA | UAUUUUCCCUUUUUAGGACCCUU | | [775-797] ORF + 3′UTR |
| 484 | GGAUAAGGAGCUUAUUCAGGUUU | AAACCUGAAUAAGCUCCUUAUCC | | [2081-2103] 3′UTR |
| 485 | UGGAUAAGGAGCUUAUUCAGGUU | AACCUGAAUAAGCUCCUUAUCCA | | [2080-2102] 3′UTR |
| 486 | GUGGAUAAGGAGCUUAUUCAGGU | ACCUGAAUAAGCUCCUUAUCCAC | | [2079-2101] 3′UTR |
| 487 | CUUAUGGAAGGCUGUUAAAUUAA | UUAAUUUAACAGCCUUCCAUAAG | | [2507-2529] 3′UTR |
| 488 | CGAAGGAAACAGAGCCGUUGACC | GGUCAACGGCUCUGUUUCCUUCG | Chimp | [181-203] 5′UTR |
| 489 | GCGAAGGAAACAGAGCCGUUGAC | GUCAACGGCUCUGUUUCCUUCGC | Chimp | [180-202] 5′UTR |
| 490 | CGCGAAGGAAACAGAGCCGUUGA | UCAACGGCUCUGUUUCCUUCGCG | Chimp | [179-201] 5′UTR |
| 491 | UCGCGAAGGAAACAGAGCCGUUG | CAACGGCUCUGUUUCCUUCGCGA | Chimp | [178-200] 5′UTR |
| 492 | CUCGCGAAGGAAACAGAGCCGUU | AACGGCUCUGUUUCCUUCGCGAG | Chimp | [177-199] 5′UTR |
| 493 | GUUCUAACAAACUAAACUCUUCA | UGAAGAGUUUAGUUUGUUAGAAC | | [2248-2270] 3′UTR |
| 494 | UGUUCUAACAAACUAAACUCUUC | GAAGAGUUUAGUUUGUUAGAACA | | [2247-2269] 3′UTR |
| 495 | CCUGUUCUUAAGUGUUGAAUACU | AGUAUUCAACACUUAAGAACAGG | | [1486-1508] 3′UTR |
| 496 | GGCCUUAUUUUUUGUCUUAUUCC | GGAAUAAGACAAAAAAUAAGGCC | | [1950-1972] 3′UTR |
| 497 | AGGCCUUAUUUUUUGUCUUAUUC | GAAUAAGACAAAAAAUAAGGCCU | | [1949-1971] 3′UTR |
| 498 | AAGGCCUUAUUUUUUGUCUUAUU | AAUAAGACAAAAAAUAAGGCCUU | | [1948-1970] 3′UTR |
| 499 | AAAGGCCUUAUUUUUUGUCUUAU | AUAAGACAAAAAAUAAGGCCUUU | | [1947-1969] 3′UTR |
| 500 | UAAAGGCCUUAUUUUUUGUCUUA | UAAGACAAAAAAUAAGGCCUUUA | | [1946-1968] 3′UTR |
| 501 | CUCUCUGAUUCACUUAGUAAUCU | AGAUUACUAAGUGAAUCAGAGAG | | [1630-1652] 3′UTR |
| 502 | CCUCUCUGAUUCACUUAGUAAUC | GAUUACUAAGUGAAUCAGAGAGG | | [1629-1651] 3′UTR |
| 503 | CCCUCUCUGAUUCACUUAGUAAU | AUUACUAAGUGAAUCAGAGAGGG | | [1628-1650] 3′UTR |
| 504 | UCCCUCUCUGAUUCACUUAGUAA | UUACUAAGUGAAUCAGAGAGGGA | | [1627-1649] 3′UTR |
| 505 | GUCCCUCUCUGAUUCACUUAGUA | UACUAAGUGAAUCAGAGAGGGAC | | [1626-1648] 3′UTR |
| 506 | GCAUCGAUGUAGAACUGUUGUCC | GGACAACAGUUCUACAUCGAUGC | | [2424-2446] 3′UTR |
| 507 | GGCAUCGAUGUAGAACUGUUGUC | GACAACAGUUCUACAUCGAUGCC | | [2423-2445] 3′UTR |
| 508 | GGGCAUCGAUGUAGAACUGUUGU | ACAACAGUUCUACAUCGAUGCCC | | [2422-2444] 3′UTR |
| 509 | UGGGCAUCGAUGUAGAACUGUUG | CAACAGUUCUACAUCGAUGCCCA | | [2421-2443] 3′UTR |
| 510 | UUGGGCAUCGAUGUAGAACUGUU | AACAGUUCUACAUCGAUGCCCAA | | [2420-2442] 3′UTR |
| 511 | CGUCGUACCUACUUUUGAGCUUA | UAAGCUCAAAAGUAGGUACGACG | | [590-612] ORF |
| 512 | GAAUGAAACUCACCGUCCAGAUA | UAUCUGGACGGUGAGUUUCAUUC | | [1869-1891] 3′UTR |
| 513 | AGAAUGAAACUCACCGUCCAGAU | AUCUGGACGGUGAGUUUCAUUCU | | [1868-1890] 3′UTR |
| 514 | GAGAAUGAAACUCACCGUCCAGA | UCUGGACGGUGAGUUUCAUUCUC | | [1867-1889] 3′UTR |
| 515 | AGAGAAUGAAACUCACCGUCCAG | CUGGACGGUGAGUUUCAUUCUCU | | [1866-1888] 3′UTR |
| 516 | UAGAGAAUGAAACUCACCGUCCA | UGGACGGUGAGUUUCAUUCUCUA | | [1865-1887] 3′UTR |
| 517 | GUCUAUUGUUAAGCUCCAAAGGU | ACCUUUGGAGCUUAACAAUAGAC | | [2342-2364] 3′UTR |
| 518 | UGUCUAUUGUUAAGCUCCAAAGG | CCUUUGGAGCUUAACAAUAGACA | | [2341-2363] 3′UTR |
| 519 | AUGUCUAUUGUUAAGCUCCAAAG | CUUUGGAGCUUAACAAUAGACAU | | [2340-2362] 3′UTR |
| 520 | CAUGUCUAUUGUUAAGCUCCAAA | UUUGGAGCUUAACAAUAGACAUG | | [2339-2361] 3′UTR |
| 521 | GCAUGUCUAUUGUUAAGCUCCAA | UUGGAGCUUAACAAUAGACAUGC | | [2338-2360] 3′UTR |
| 522 | CAACCUCAACGAGGUAAUAUUUG | CAAAUAUUACCUCGUUGAGGUUG | Chimp | [329-351] ORF |
| 523 | CCAACCUCAACGAGGUAAUAUUU | AAAUAUUACCUCGUUGAGGUUGG | Chimp | [328-350] ORF |
| 524 | CCCAACCUCAACGAGGUAAUAUU | AAUAUUACCUCGUUGAGGUUGGG | Chimp | [327-349] ORF |
| 525 | ACCCAACCUCAACGAGGUAAUAU | AUAUUACCUCGUUGAGGUUGGGU | Chimp | [326-348] ORF |
| 526 | AACCCAACCUCAACGAGGUAAUA | UAUUACCUCGUUGAGGUUGGGUU | Chimp | [325-347] ORF |
| 527 | GGGCCAAGAUAAAUCAAUGUUGU | ACAACAUUGAUUUAUCUUGGCCC | | [2312-2334] 3′UTR |
| 528 | UGGGCCAAGAUAAAUCAAUGUUG | CAACAUUGAUUUAUCUUGGCCCA | | [2311-2333] 3′UTR |
| 529 | UUGGGCCAAGAUAAAUCAAUGUU | AACAUUGAUUUAUCUUGGCCCAA | | [2310-2332] 3′UTR |
| 530 | AUUGGGCCAAGAUAAAUCAAUGU | ACAUUGAUUUAUCUUGGCCCAAU | | [2309-2331] 3′UTR |
| 531 | AAUUGGGCCAAGAUAAAUCAAUG | CAUUGAUUUAUCUUGGCCCAAUU | | [2308-2330] 3′UTR |
| 532 | GGUAGGCUUGGUAAUAGACUAUA | UAUAGUCUAUUACCAAGCCUACC | | [1098-1120] 3′UTR |
| 533 | GGUAAUAUUUGAGGAAUCAACUU | AAGUUGAUUCCUCAAAUAUUACC | Chimp | [341-363] ORF |
| 534 | AGGUAAUAUUUGAGGAAUCAACU | AGUUGAUUCCUCAAAUAUUACCU | Chimp | [340-362] ORF |
| 535 | GAGGUAAUAUUUGAGGAAUCAAC | GUUGAUUCCUCAAAUAUUACCUC | Chimp | [339-361] ORF |
| 536 | UGUAUGUAAAAAGCUGGAUAGGA | UCCUAUCCAGCUUUUUACAUACA | Dog, Chimp, Ms | [551-573] ORF |
| 537 | AUGUAUGUAAAAAGCUGGAUAGG | CCUAUCCAGCUUUUUACAUACAU | Dog, Chimp, Ms | [550-572] ORF |
| 538 | AAUGUAUGUAAAAAGCUGGAUAG | CUAUCCAGCUUUUUACAUACAUU | Dog, Chimp, Ms | [549-571] ORF |
| 539 | AAAUGUAUGUAAAAAGCUGGAUA | UAUCCAGCUUUUUACAUACAUUU | Dog, Chimp, Ms | [548-570] ORF |
| 540 | GAAACGGGUCAAUUUACGAAGUC | GACUUCGUAAAUUGACCCGUUUC | | [1806-1828] 3′UTR |
| 541 | UGAAACGGGUCAAUUUACGAAGU | ACUUCGUAAAUUGACCCGUUUCA | | [1805-1827] 3′UTR |
| 542 | UUGAAACGGGUCAAUUUACGAAG | CUUCGUAAAUUGACCCGUUUCAA | | [1804-1826] 3′UTR |
| 543 | AUUGAAACGGGUCAAUUUACGAA | UUCGUAAAUUGACCCGUUUCAAU | | [1803-1825] 3′UTR |
| 544 | UAUUGAAACGGGUCAAUUUACGA | UCGUAAAUUGACCCGUUUCAAUA | | [1802-1824] 3′UTR |
| 545 | GUUGCAACUGGCAGUUUGAGCAG | CUGCUCAAACUGCCAGUUGCAAC | Chimp | [207-229] ORF |
| 546 | GGUUGCAACUGGCAGUUUGAGCA | UGCUCAAACUGCCAGUUGCAACC | Chimp | [206-228] ORF |
| 547 | UGGUUGCAACUGGCAGUUUGAGC | GCUCAAACUGCCAGUUGCAACCA | Chimp | [205-227] ORF |
| 548 | AUGGUUGCAACUGGCAGUUUGAG | CUCAAACUGCCAGUUGCAACCAU | Chimp | [204-226] ORF |
| 549 | CAUGGUUGCAACUGGCAGUUUGA | UCAAACUGCCAGUUGCAACCAUG | Chimp | [203-225] 5′UTR + ORF |
| 550 | CCUAGAGAAUGAAACUCACCGUC | GACGGUGAGUUUCAUUCUCUAGG | | [1863-1885] 3′UTR |
| 551 | GCCUAGAGAAUGAAACUCACCGU | ACGGUGAGUUUCAUUCUCUAGGC | | [1862-1884] 3′UTR |
| 552 | AGCCUAGAGAAUGAAACUCACCG | CGGUGAGUUUCAUUCUCUAGGCU | | [1861-1883] 3′UTR |
| 553 | CAGCCUAGAGAAUGAAACUCACC | GGUGAGUUUCAUUCUCUAGGCUG | | [1860-1882] 3′UTR |
| 554 | ACAGCCUAGAGAAUGAAACUCAC | GUGAGUUUCAUUCUCUAGGCUGU | | [1859-1881] 3′UTR |
| 555 | GCCUGCUAAGUGAUUUUGACUAC | GUAGUCAAAAUCACUUAGCAGGC | Chimp | [283-305] ORF |
| 556 | AGCCUGCUAAGUGAUUUUGACUA | UAGUCAAAAUCACUUAGCAGGCU | Chimp | [282-304] ORF |
| 557 | GAGCCUGCUAAGUGAUUUUGACU | AGUCAAAAUCACUUAGCAGGCUC | Chimp | [281-303] ORF |
| 558 | AGAGCCUGCUAAGUGAUUUUGAC | GUCAAAAUCACUUAGCAGGCUCU | Chimp | [280-302] ORF |
| 559 | GAGAGCCUGCUAAGUGAUUUUGA | UCAAAAUCACUUAGCAGGCUCUC | Chimp | [279-301] ORF |
| 560 | CUAUUAGCUCCACUUCACAUGCU | AGCAUGUGAAGUGGAGCUAAUAG | | [2114-2136] 3′UTR |
| 561 | GCUAUUAGCUCCACUUCACAUGC | GCAUGUGAAGUGGAGCUAAUAGC | | [2113-2135] 3′UTR |
| 562 | AGCUAUUAGCUCCACUUCACAUG | CAUGUGAAGUGGAGCUAAUAGCU | | [2112-2134] 3′UTR |
| 563 | UAGCUAUUAGCUCCACUUCACAU | AUGUGAAGUGGAGCUAAUAGCUA | | [2111-2133] 3′UTR |
| 564 | CUAGCUAUUAGCUCCACUUCACA | UGUGAAGUGGAGCUAAUAGCUAG | | [2110-2132] 3′UTR |
| 565 | CAACAGUGAUUGAAGGGUCCUAA | UUAGGACCCUUCAAUCACUGUUG | | [763-785] ORF |
| 566 | GGGUAGUAGCUGUAUACUACCAC | GUGGUAGUAUACAGCUACUACCC | | [1772-1794] 3′UTR |
| 567 | AGGGUAGUAGCUGUAUACUACCA | UGGUAGUAUACAGCUACUACCCU | | [1771-1793] 3′UTR |
| 568 | AAGGGUAGUAGCUGUAUACUACC | GGUAGUAUACAGCUACUACCCUU | | [1770-1792] 3′UTR |
| 569 | GGAUUAAGUAGGUGAGUUUAAUU | AAUUAAACUCACCUACUUAAUCC | | [1292-1314] 3′UTR |
| 570 | AGGAUUAAGUAGGUGAGUUUAAU | AUUAAACUCACCUACUUAAUCCU | | [1291-1313] 3′UTR |
| 571 | UAGGAUUAAGUAGGUGAGUUUAA | UUAAACUCACCUACUUAAUCCUA | | [1290-1312] 3′UTR |
| 572 | GUAGGAUUAAGUAGGUGAGUUUA | UAAACUCACCUACUUAAUCCUAC | | [1289-1311] 3′UTR |
| 573 | GGUAGGAUUAAGUAGGUGAGUUU | AAACUCACCUACUUAAUCCUACC | | [1288-1310] 3′UTR |
| 574 | UGUUGUUUUGCAUGUCUAUUGUU | AACAAUAGACAUGCAAAACAACA | | [2329-2351] 3′UTR |
| 575 | AUGUUGUUUUGCAUGUCUAUUGU | ACAAUAGACAUGCAAAACAACAU | | [2328-2350] 3′UTR |
| 576 | AAUGUUGUUUUGCAUGUCUAUUG | CAAUAGACAUGCAAAACAACAUU | | [2327-2349] 3′UTR |
| 577 | CAAUGUUGUUUUGCAUGUCUAUU | AAUAGACAUGCAAAACAACAUUG | | [2326-2348] 3′UTR |
| 578 | UCAAUGUUGUUUUGCAUGUCUAU | AUAGACAUGCAAAACAACAUUGA | | [2325-2347] 3′UTR |
| 579 | GUUCCUGACUCAAAUUUGAAGGG | CCCUUCAAAUUUGAGUCAGGAAC | | [1251-1273] 3′UTR |
| 580 | AGUUCCUGACUCAAAUUUGAAGG | CCUUCAAAUUUGAGUCAGGAACU | | [1250-1272] 3′UTR |
| 581 | CAGUUCCUGACUCAAAUUUGAAG | CUUCAAAUUUGAGUCAGGAACUG | | [1249-1271] 3′UTR |
| 582 | CCAGUUCCUGACUCAAAUUUGAA | UUCAAAUUUGAGUCAGGAACUGG | | [1248-1270] 3′UTR |
| 583 | ACCAGUUCCUGACUCAAAUUUGA | UCAAAUUUGAGUCAGGAACUGGU | | [1247-1269] 3′UTR |
| 584 | AGUAACCACGGUGUUGUUUUAGA | UCUAAAACAACACCGUGGUUACU | | [1441-1463] 3′UTR |
| 585 | CAGUAACCACGGUGUUGUUUUAG | CUAAAACAACACCGUGGUUACUG | | [1440-1462] 3′UTR |
| 586 | UCAGUAACCACGGUGUUGUUUUA | UAAAACAACACCGUGGUUACUGA | | [1439-1461] 3′UTR |
| 587 | UUCAGUAACCACGGUGUUGUUUU | AAAACAACACCGUGGUUACUGAA | | [1438-1460] 3′UTR |
| 588 | UUUCAGUAACCACGGUGUUGUUU | AAACAACACCGUGGUUACUGAAA | | [1437-1459] 3′UTR |
| 589 | AUUUCAGUAACCACGGUGUUGUU | AACAACACCGUGGUUACUGAAAU | | [1436-1458] 3′UTR |
| 590 | AGAUUUUUUCCACCUUGGAUACC | GGUAUCCAAGGUGGAAAAAAUCU | | [1907-1929] 3′UTR |
| 591 | CAGAUUUUUUCCACCUUGGAUAC | GUAUCCAAGGUGGAAAAAAUCUG | | [1906-1928] 3′UTR |
| 592 | CCAGAUUUUUUCCACCUUGGAUA | UAUCCAAGGUGGAAAAAAUCUGG | | [1905-1927] 3′UTR |
| 593 | CCCAGAUUUUUUCCACCUUGGAU | AUCCAAGGUGGAAAAAAUCUGGG | | [1904-1926] 3′UTR |
| 594 | ACCCAGAUUUUUUCCACCUUGGA | UCCAAGGUGGAAAAAAUCUGGGU | | [1903-1925] 3′UTR |
| 595 | CAGAUUUGCCUAUUUUGAUUUUC | GAAAAUCAAAAUAGGCAAAUCUG | | [1126-1148] 3′UTR |
| 596 | UUUAUAGUACAGCCUAGAGAAUG | CAUUCUCUAGGCUGUACUAUAAA | | [1851-1873] 3′UTR |
| 597 | GUUUAUAGUACAGCCUAGAGAAU | AUUCUCUAGGCUGUACUAUAAAC | | [1850-1872] 3′UTR |
| 598 | GGUUUAUAGUACAGCCUAGAGAA | UUCUCUAGGCUGUACUAUAAACC | | [1849-1871] 3′UTR |
| 599 | GCGAGGUUGUGUUAUGCACGUGA | UCACGUGCAUAACACAACCUCGC | Ms | [512-534] ORF |
| 600 | GAUACCUGUCACUAGGGAAUAAU | AUUAUUCCCUAGUGACAGGUAUC | | [1924-1946] 3′UTR |
| 601 | GGAUACCUGUCACUAGGGAAUAA | UUAUUCCCUAGUGACAGGUAUCC | | [1923-1945] 3′UTR |
| 602 | UGGAUACCUGUCACUAGGGAAUA | UAUUCCCUAGUGACAGGUAUCCA | | [1922-1944] 3′UTR |
| 603 | UUGGAUACCUGUCACUAGGGAAU | AUUCCCUAGUGACAGGUAUCCAA | | [1921-1943] 3′UTR |
| 604 | CUUGGAUACCUGUCACUAGGGAA | UUCCCUAGUGACAGGUAUCCAAG | | [1920-1942] 3′UTR |
| 605 | UAAAUGAGAAAUAUUACGGCAAU | AUUGCCGUAAUAUUUCUCAUUUA | | [1337-1359] 3′UTR |
| 606 | CCUAUCAAAACUUCCAAAAGCCC | GGGCUUUUGGAAGUUUUGAUAGG | | [1219-1241] 3′UTR |
| 607 | GCGUAGGGACAGAUGUAUUCAUC | GAUGAAUACAUCUGUCCCUACGC | | [2145-2167] 3′UTR |
| 608 | GGCGUAGGGACAGAUGUAUUCAU | AUGAAUACAUCUGUCCCUACGCC | | [2144-2166] 3′UTR |
| 609 | CGGCGUAGGGACAGAUGUAUUCA | UGAAUACAUCUGUCCCUACGCCG | | [2143-2165] 3′UTR |
| 610 | CCGGCGUAGGGACAGAUGUAUUC | GAAUACAUCUGUCCCUACGCCGG | | [2142-2164] 3′UTR |
| 611 | ACCGGCGUAGGGACAGAUGUAUU | AAUACAUCUGUCCCUACGCCGGU | | [2141-2163] 3′UTR |
| 612 | GAUACUAUAAGUGACCUAAAAUG | CAUUUUAGGUCACUUAUAGUAUC | | [2204-2226] 3′UTR |
| 613 | UGAUACUAUAAGUGACCUAAAAU | AUUUUAGGUCACUUAUAGUAUCA | | [2203-2225] 3′UTR |
| 614 | CUGAUACUAUAAGUGACCUAAAA | UUUUAGGUCACUUAUAGUAUCAG | | [2202-2224] 3′UTR |
| 615 | ACUGAUACUAUAAGUGACCUAAA | UUUAGGUCACUUAUAGUAUCAGU | | [2201-2223] 3′UTR |
| 616 | UACUGAUACUAUAAGUGACCUAA | UUAGGUCACUUAUAGUAUCAGUA | | [2200-2222] 3′UTR |
| 617 | CGAAGUCUGCAUUGGCUAUGGAG | CUCCAUAGCCAAUGCAGACUUCG | | [1822-1844] 3′UTR |
| 618 | ACGAAGUCUGCAUUGGCUAUGGA | UCCAUAGCCAAUGCAGACUUCGU | | [1821-1843] 3′UTR |
| 619 | UACGAAGUCUGCAUUGGCUAUGG | CCAUAGCCAAUGCAGACUUCGUA | | [1820-1842] 3′UTR |
| 620 | UUACGAAGUCUGCAUUGGCUAUG | CAUAGCCAAUGCAGACUUCGUAA | | [1819-1841] 3′UTR |
| 621 | UUUACGAAGUCUGCAUUGGCUAU | AUAGCCAAUGCAGACUUCGUAAA | | [1818-1840] 3′UTR |
| 622 | GGAUAGGAUUGUGUGUGAUUCUA | UAGAAUCACACACAAUCCUAUCC | Chin, GP, Chimp, Rat | [566-588] ORF |
| 623 | UGGAUAGGAUUGUGUGUGAUUCU | AGAAUCACACACAAUCCUAUCCA | Chin, GP, Chimp, Rat | [565-587] ORF |
| 624 | CUGGAUAGGAUUGUGUGUGAUUC | GAAUCACACACAAUCCUAUCCAG | Chin, GP, Chimp, Rat | [564-586] ORF |
| 625 | GCUGGAUAGGAUUGUGUGUGAUU | AAUCACACACAAUCCUAUCCAGC | Chin, GP, Chimp, Rat | [563-585] ORF |
| 626 | AGCUGGAUAGGAUUGUGUGUGAU | AUCACACACAAUCCUAUCCAGCU | Chin, GP, Chimp, Rat | [562-584] ORF |
| 627 | UGGCCUUUGGAGAAGUGAUUCAA | UUGAAUCACUUCUCCAAAGGCCA | | [958-980] 3′UTR |
| 628 | CUGGCCUUUGGAGAAGUGAUUCA | UGAAUCACUUCUCCAAAGGCCAG | | [957-979] 3′UTR |
| 629 | UCUGGCCUUUGGAGAAGUGAUUC | GAAUCACUUCUCCAAAGGCCAGA | | [956-978] 3′UTR |
| 630 | UUCUGGCCUUUGGAGAAGUGAUU | AAUCACUUCUCCAAAGGCCAGAA | | [955-977] 3′UTR |
| 631 | AUAGGUAAGCAAAAGUAGAAGCC | GGCUUCUACUUUUGCUUACCUAU | | [1037-1059] 3′UTR |
| 632 | AAUAGGUAAGCAAAAGUAGAAGC | GCUUCUACUUUUGCUUACCUAUU | | [1036-1058] 3′UTR |
| 633 | AGGUAGGAUUAAGUAGGUGAGUU | AACUCACCUACUUAAUCCUACCU | | [1287-1309] 3′UTR |
| 634 | AAGGUAGGAUUAAGUAGGUGAGU | ACUCACCUACUUAAUCCUACCUU | | [1286-1308] 3′UTR |
| 635 | GAAGGUAGGAUUAAGUAGGUGAG | CUCACCUACUUAAUCCUACCUUC | | [1285-1307] 3′UTR |
| 636 | GGAAGGUAGGAUUAAGUAGGUGA | UCACCUACUUAAUCCUACCUUCC | | [1284-1306] 3′UTR |
| 637 | GAUUAAGUAGGUGAGUUUAAUUA | UAAUUAAACUCACCUACUUAAUC | | [1293-1315] 3′UTR |
| 638 | AGGAAGGUAGGAUUAAGUAGGUG | CACCUACUUAAUCCUACCUUCCU | | [1283-1305] 3′UTR |
| 639 | CAGGAAGGUAGGAUUAAGUAGGU | ACCUACUUAAUCCUACCUUCCUG | | [1282-1304] 3′UTR |
| 640 | ACAGGAAGGUAGGAUUAAGUAGG | CCUACUUAAUCCUACCUUCCUGU | | [1281-1303] 3′UTR |
| 641 | AACAGGUGUGAUCCUGUUACUGA | UCAGUAACAGGAUCACACCUGUU | | [2183-2205] 3′UTR |
| 642 | CAUGGACUAGCUUCAGGGACUUU | AAAGUCCCUGAAGCUAGUCCAUG | Dog, Chimp | [640-662] ORF |
| 643 | UCAUGGACUAGCUUCAGGGACUU | AAGUCCCUGAAGCUAGUCCAUGA | Dog, Chimp | [639-661] ORF |
| 644 | CUCAUGGACUAGCUUCAGGGACU | AGUCCCUGAAGCUAGUCCAUGAG | Dog, Chimp | [638-660] ORF |
| 645 | GCUCAUGGACUAGCUUCAGGGAC | GUCCCUGAAGCUAGUCCAUGAGC | Dog, Chimp | [637-659] ORF |
| 646 | UGCUCAUGGACUAGCUUCAGGGA | UCCCUGAAGCUAGUCCAUGAGCA | Dog, Chimp | [636-658] ORF |
| 647 | AUUUGAAGGGUUUUUAGACAGGA | UCCUGUCUAAAAACCCUUCAAAU | | [1264-1286] 3′UTR |
| 648 | ACAACAGUGAUUGAAGGGUCCUA | UAGGACCCUUCAAUCACUGUUGU | | [762-784] ORF |
| 649 | UGUACAGAAUUGAAUGGGAUGGA | UCCAUCCCAUUCAAUUCUGUACA | | [1014-1036] 3′UTR |
| 650 | UUGUACAGAAUUGAAUGGGAUGG | CCAUCCCAUUCAAUUCUGUACAA | | [1013-1035] 3′UTR |
| 651 | UUUGUACAGAAUUGAAUGGGAUG | CAUCCCAUUCAAUUCUGUACAAA | | [1012-1034] 3′UTR |
| 652 | UUUUGUACAGAAUUGAAUGGGAU | AUCCCAUUCAAUUCUGUACAAAA | | [1011-1033] 3′UTR |
| 653 | UUUUUGUACAGAAUUGAAUGGGA | UCCCAUUCAAUUCUGUACAAAAA | | [1010-1032] 3′UTR |
| 654 | CUCAACGAGGUAAUAUUUGAGGA | UCCUCAAAUAUUACCUCGUUGAG | Chimp | [333-355] ORF |
| 655 | CCUCAACGAGGUAAUAUUUGAGG | CCUCAAAUAUUACCUCGUUGAGG | Chimp | [332-354] ORF |
| 656 | ACCUCAACGAGGUAAUAUUUGAG | CUCAAAUAUUACCUCGUUGAGGU | Chimp | [331-353] ORF |
| 657 | AACCUCAACGAGGUAAUAUUUGA | UCAAAUAUUACCUCGUUGAGGUU | Chimp | [330-352] ORF |
| 658 | UCUCUGGGCUUUUCUGGGAAUUG | CAAUUCCCAGAAAAGCCCAGAGA | | [1720-1742] 3′UTR |
| 659 | AUCUCUGGGCUUUUCUGGGAAUU | AAUUCCCAGAAAAGCCCAGAGAU | | [1719-1741] 3′UTR |
| 660 | CAUCUCUGGGCUUUUCUGGGAAU | AUUCCCAGAAAAGCCCAGAGAUG | | [1718-1740] 3′UTR |
| 661 | UCAUCUCUGGGCUUUUCUGGGAA | UUCCCAGAAAAGCCCAGAGAUGA | | [1717-1739] 3′UTR |
| 662 | GGCUUGCGAGGUUGUGUUAUGCA | UGCAUAACACAACCUCGCAAGCC | Chimp | [507-529] ORF |
| 663 | CGGCUUGCGAGGUUGUGUUAUGC | GCAUAACACAACCUCGCAAGCCG | Chimp | [506-528] ORF |
| 664 | GCGGCUUGCGAGGUUGUGUUAUG | CAUAACACAACCUCGCAAGCCGC | Chimp | [505-527] ORF |
| 665 | UGCGGCUUGCGAGGUUGUGUUAU | AUAACACAACCUCGCAAGCCGCA | Chimp | [504-526] ORF |
| 666 | CUGCGGCUUGCGAGGUUGUGUUA | UAACACAACCUCGCAAGCCGCAG | Chimp | [503-525] ORF |
| 667 | UACGGCAAUAAUGGAACUGCUUC | GAAGCAGUUCCAUUAUUGCCGUA | | [1351-1373] 3′UTR |
| 668 | UUACGGCAAUAAUGGAACUGCUU | AAGCAGUUCCAUUAUUGCCGUAA | | [1350-1372] 3′UTR |
| 669 | AUUACGGCAAUAAUGGAACUGCU | AGCAGUUCCAUUAUUGCCGUAAU | | [1349-1371] 3′UTR |
| 670 | CUUUACUCACUGAUUGGAACAAC | GUUGUUCCAAUCAGUGAGUAAAG | | [744-766] ORF |
| 671 | ACUUUACUCACUGAUUGGAACAA | UUGUUCCAAUCAGUGAGUAAAGU | | [743-765] ORF |
| 672 | AACUUUACUCACUGAUUGGAACA | UGUUCCAAUCAGUGAGUAAAGUU | | [742-764] ORF |
| 673 | AAACUUUACUCACUGAUUGGAAC | GUUCCAAUCAGUGAGUAAAGUUU | | [741-763] ORF |
| 674 | AAAACUUUACUCACUGAUUGGAA | UUCCAAUCAGUGAGUAAAGUUUU | | [740-762] ORF |
| 675 | UUUUAGACAGGAAGGUAGGAUUA | UAAUCCUACCUUCCUGUCUAAAA | | [1275-1297] 3′UTR |
| 676 | UGACUUCCUCACUCUAAUGUUUU | AAAACAUUAGAGUGAGGAAGUCA | | [1386-1408] 3′UTR |
| 677 | GGACUUUUUCUUUAGUAGAGGUC | GACCUCUACUAAAGAAAAAGUCC | | [656-678] ORF |
| 678 | GGGACUUUUUCUUUAGUAGAGGU | ACCUCUACUAAAGAAAAAGUCCC | | [655-677] ORF |
| 679 | AGGGACUUUUUCUUUAGUAGAGG | CCUCUACUAAAGAAAAAGUCCCU | | [654-676] ORF |
| 680 | CAGGGACUUUUUCUUUAGUAGAG | CUCUACUAAAGAAAAAGUCCCUG | | [653-675] ORF |
| 681 | UCAGGGACUUUUUCUUUAGUAGA | UCUACUAAAGAAAAAGUCCCUGA | | [652-674] ORF |
| 682 | CUCUGAUUCACUUAGUAAUCUAU | AUAGAUUACUAAGUGAAUCAGAG | | [1632-1654] 3′UTR |
| 683 | UCUCUGAUUCACUUAGUAAUCUA | UAGAUUACUAAGUGAAUCAGAGA | | [1631-1653] 3′UTR |
| 684 | GGGAAUAAUAAAGGCCUUAUUUU | AAAAUAAGGCCUUUAUUAUUCCC | | [1938-1960] 3′UTR |
| 685 | AGGGAAUAAUAAAGGCCUUAUUU | AAAUAAGGCCUUUAUUAUUCCCU | | [1937-1959] 3′UTR |
| 686 | UAGGGAAUAAUAAAGGCCUUAUU | AAUAAGGCCUUUAUUAUUCCCUA | | [1936-1958] 3′UTR |
| 687 | CUAGGGAAUAAUAAAGGCCUUAU | AUAAGGCCUUUAUUAUUCCCUAG | | [1935-1957] 3′UTR |
| 688 | ACUAGGGAAUAAUAAAGGCCUUA | UAAGGCCUUUAUUAUUCCCUAGU | | [1934-1956] 3′UTR |
| 689 | AAUACCUGUGAGGAUAGGAAAUU | AAUUUCCUAUCCUCACAGGUAUU | | [1589-1611] 3′UTR |
| 690 | GAAUACCUGUGAGGAUAGGAAAU | AUUUCCUAUCCUCACAGGUAUUC | | [1588-1610] 3′UTR |
| 691 | UGAAUACCUGUGAGGAUAGGAAA | UUUCCUAUCCUCACAGGUAUUCA | | [1587-1609] 3′UTR |
| 692 | CCUUGGAUACCUGUCACUAGGGA | UCCCUAGUGACAGGUAUCCAAGG | | [1919-1941] 3′UTR |
| 693 | CUAGCUUCAGGGACUUUUUCUUU | AAAGAAAAAGUCCCUGAAGCUAG | Chimp | [646-668] ORF |
| 694 | ACUAGCUUCAGGGACUUUUUCUU | AAGAAAAAGUCCCUGAAGCUAGU | Chimp | [645-667] ORF |
| 695 | GACUAGCUUCAGGGACUUUUUCU | AGAAAAAGUCCCUGAAGCUAGUC | Chimp | [644-666] ORF |
| 696 | GGACUAGCUUCAGGGACUUUUUC | GAAAAAGUCCCUGAAGCUAGUCC | Chimp | [643-665] ORF |
| 697 | UGGACUAGCUUCAGGGACUUUUU | AAAAAGUCCCUGAAGCUAGUCCA | Chimp | [642-664] ORF |
| 698 | AAAGAUACUACAAAGCCAAUCUU | AAGAUUGGCUUUGUAGUAUCUUU | | [2280-2302] 3′UTR |
| 699 | AAGCUGGAUAGGAUUGUGUGUGA | UCACACACAAUCCUAUCCAGCUU | Chin, GP, Chimp, Rat | [561-583] ORF |
| 700 | UGUGGUGCCAUUUCAGUAACCAC | GUGGUUACUGAAAUGGCACCACA | | [1427-1449] 3′UTR |
| 701 | UUGUGGUGCCAUUUCAGUAACCA | UGGUUACUGAAAUGGCACCACAA | | [1426-1448] 3′UTR |
| 702 | CUUGUGGUGCCAUUUCAGUAACC | GGUUACUGAAAUGGCACCACAAG | | [1425-1447] 3′UTR |
| 703 | GCUUGUGGUGCCAUUUCAGUAAC | GUUACUGAAAUGGCACCACAAGC | | [1424-1446] 3′UTR |
| 704 | AGCUUGUGGUGCCAUUUCAGUAA | UUACUGAAAUGGCACCACAAGCU | | [1423-1445] 3′UTR |
| 705 | CUUUAUAGAAUUGGGCCAAGAUA | UAUCUUGGCCCAAUUCUAUAAAG | | [2300-2322] 3′UTR |
| 706 | GUUUCAGGUAGGCUUGGUAAUAG | CUAUUACCAAGCCUACCUGAAAC | | [1092-1114] 3′UTR |
| 707 | GGUUUCAGGUAGGCUUGGUAAUA | UAUUACCAAGCCUACCUGAAACC | | [1091-1113] 3′UTR |
| 708 | UGGUUUCAGGUAGGCUUGGUAAU | AUUACCAAGCCUACCUGAAACCA | | [1090-1112] 3′UTR |
| 709 | UUGGUUUCAGGUAGGCUUGGUAA | UUACCAAGCCUACCUGAAACCAA | | [1089-1111] 3′UTR |
| 710 | UUUGGUUUCAGGUAGGCUUGGUA | UACCAAGCCUACCUGAAACCAAA | | [1088-1110] 3′UTR |
| 711 | UGGGUCGUGGAUAAGGAGCUUAU | AUAAGCUCCUUAUCCACGACCCA | | [2073-2095] 3′UTR |
| 712 | GUGGGUCGUGGAUAAGGAGCUUA | UAAGCUCCUUAUCCACGACCCAC | | [2072-2094] 3′UTR |
| 713 | AAUGGUGAUGGCUUAUGGAAGGC | GCCUUCCAUAAGCCAUCACCAUU | | [2496-2518] 3′UTR |
| 714 | AAAUGGUGAUGGCUUAUGGAAGG | CCUUCCAUAAGCCAUCACCAUUU | | [2495-2517] 3′UTR |
| 715 | AAAAUGGUGAUGGCUUAUGGAAG | CUUCCAUAAGCCAUCACCAUUUU | | [2494-2516] 3′UTR |
| 716 | CAAAAUGGUGAUGGCUUAUGGAA | UUCCAUAAGCCAUCACCAUUUUG | | [2493-2515] 3′UTR |
| 717 | AAGCUUGUGGUGCCAUUUCAGUA | UACUGAAAUGGCACCACAAGCUU | | [1422-1444] 3′UTR |
| 718 | AAAGCUUGUGGUGCCAUUUCAGU | ACUGAAAUGGCACCACAAGCUUU | | [1421-1443] 3′UTR |
| 719 | AAAAGCUUGUGGUGCCAUUUCAG | CUGAAAUGGCACCACAAGCUUUU | | [1420-1442] 3′UTR |
| 720 | UAGGUAAGCAAAAGUAGAAGCCC | GGGCUUCUACUUUUGCUUACCUA | | [1038-1060] 3′UTR |
| 721 | UGAUUUUCUGGCCUUUGGAGAAG | CUUCUCCAAAGGCCAGAAAAUCA | | [950-972] 3′UTR |
| 722 | CUGAUUUUCUGGCCUUUGGAGAA | UUCUCCAAAGGCCAGAAAAUCAG | | [949-971] 3′UTR |
| 723 | GCUGAUUUUCUGGCCUUUGGAGA | UCUCCAAAGGCCAGAAAAUCAGC | | [948-970] 3′UTR |
| 724 | AGGCUGAUUUUCUGGCCUUUGGA | UCCAAAGGCCAGAAAAUCAGCCU | | [946-968] 3′UTR |
| 725 | AGGCUUCUUGGGCAUCGAUGUAG | CUACAUCGAUGCCCAAGAAGCCU | | [2413-2435] 3′UTR |
| 726 | AAGGCUUCUUGGGCAUCGAUGUA | UACAUCGAUGCCCAAGAAGCCUU | | [2412-2434] 3′UTR |
| 727 | CAAGGCUUCUUGGGCAUCGAUGU | ACAUCGAUGCCCAAGAAGCCUUG | | [2411-2433] 3′UTR |
| 728 | CCGUCCAGAUAACCAUGCAUGCA | UGCAUGCAUGGUUAUCUGGACGG | | [1881-1903] 3′UTR |
| 729 | ACCGUCCAGAUAACCAUGCAUGC | GCAUGCAUGGUUAUCUGGACGGU | | [1880-1902] 3′UTR |
| 730 | CACCGUCCAGAUAACCAUGCAUG | CAUGCAUGGUUAUCUGGACGGUG | | [1879-1901] 3′UTR |
| 731 | UCACCGUCCAGAUAACCAUGCAU | AUGCAUGGUUAUCUGGACGGUGA | | [1878-1900] 3′UTR |
| 732 | CUCACCGUCCAGAUAACCAUGCA | UGCAUGGUUAUCUGGACGGUGAG | | [1877-1899] 3′UTR |
| 733 | AACCAUGCAUGCACCCAGAUUUU | AAAAUCUGGGUGCAUGCAUGGUU | | [1891-1913] 3′UTR |
| 734 | UAACCAUGCAUGCACCCAGAUUU | AAAUCUGGGUGCAUGCAUGGUUA | | [1890-1912] 3′UTR |
| 735 | AUAACCAUGCAUGCACCCAGAUU | AAUCUGGGUGCAUGCAUGGUUAU | | [1889-1911] 3′UTR |
| 736 | GAUAACCAUGCAUGCACCCAGAU | AUCUGGGUGCAUGCAUGGUUAUC | | [1888-1910] 3′UTR |
| 737 | AGAUAACCAUGCAUGCACCCAGA | UCUGGGUGCAUGCAUGGUUAUCU | | [1887-1909] 3′UTR |
| 738 | GAAUUGGGCCAAGAUAAAUCAAU | AUUGAUUUAUCUUGGCCCAAUUC | | [2307-2329] 3′UTR |
| 739 | GUGAGGAUAGGAAAUUAGUUCUG | CAGAACUAAUUUCCUAUCCUCAC | | [1596-1618] 3′UTR |
| 740 | UGUGAGGAUAGGAAAUUAGUUCU | AGAACUAAUUUCCUAUCCUCACA | | [1595-1617] 3′UTR |
| 741 | GAUUUUUUCCACCUUGGAUACCU | AGGUAUCCAAGGUGGAAAAAAUC | | [1908-1930] 3′UTR |
| 742 | GAAGCCCAUUUGAGUUUUACAUU | AAUGUAAAACUCAAAUGGGCUUC | | [1054-1076] 3′UTR |
| 743 | AGAAGCCCAUUUGAGUUUUACAU | AUGUAAAACUCAAAUGGGCUUCU | | [1053-1075] 3′UTR |
| 744 | UAGAAGCCCAUUUGAGUUUUACA | UGUAAAACUCAAAUGGGCUUCUA | | [1052-1074] 3′UTR |
| 745 | GUAGAAGCCCAUUUGAGUUUUAC | GUAAAACUCAAAUGGGCUUCUAC | | [1051-1073] 3′UTR |
| 746 | AGUAGAAGCCCAUUUGAGUUUUA | UAAAACUCAAAUGGGCUUCUACU | | [1050-1072] 3′UTR |
| 747 | AGCAGGAGAACUGCUCAUGGACU | AGUCCAUGAGCAGUUCUCCUGCU | Dog, Chimp | [625-647] ORF |
| 748 | AAGCAGGAGAACUGCUCAUGGAC | GUCCAUGAGCAGUUCUCCUGCUU | Dog, Chimp | [624-646] ORF |
| 749 | UAAGCAGGAGAACUGCUCAUGGA | UCCAUGAGCAGUUCUCCUGCUUA | Dog, Chimp | [623-645] ORF |
| 750 | GCAUGCACCCAGAUUUUUUCCAC | GUGGAAAAAAUCUGGGUGCAUGC | | [1897-1919] 3′UTR |
| 751 | UGCAUGCACCCAGAUUUUUUCCA | UGGAAAAAAUCUGGGUGCAUGCA | | [1896-1918] 3′UTR |
| 752 | AUGCAUGCACCCAGAUUUUUUCC | GGAAAAAAUCUGGGUGCAUGCAU | | [1895-1917] 3′UTR |
| 753 | CAUGCAUGCACCCAGAUUUUUUC | GAAAAAAUCUGGGUGCAUGCAUG | | [1894-1916] 3′UTR |
| 754 | CCAUGCAUGCACCCAGAUUUUUU | AAAAAAUCUGGGUGCAUGCAUGG | | [1893-1915] 3′UTR |
| 755 | CCUGCUAAGUGAUUUUGACUACU | AGUAGUCAAAAUCACUUAGCAGG | Chimp | [284-306] ORF |
| 756 | UACUGGGAUUAUGUUGUUCCUGA | UCAGGAACAACAUAAUCCCAGUA | Chimp | [303-325] ORF |
| 757 | CUCUUGCCUGUUAUGCUUACAAA | UUUGUAAGCAUAACAGGCAAGAG | | [2474-2496] 3′UTR |
| 758 | CCACCUUGGAUACCUGUCACUAG | CUAGUGACAGGUAUCCAAGGUGG | | [1916-1938] 3′UTR |
| 759 | UCCACCUUGGAUACCUGUCACUA | UAGUGACAGGUAUCCAAGGUGGA | | [1915-1937] 3′UTR |
| 760 | UUCCACCUUGGAUACCUGUCACU | AGUGACAGGUAUCCAAGGUGGAA | | [1914-1936] 3′UTR |
| 761 | UUUCCACCUUGGAUACCUGUCAC | GUGACAGGUAUCCAAGGUGGAAA | | [1913-1935] 3′UTR |
| 762 | UUUUCCACCUUGGAUACCUGUCA | UGACAGGUAUCCAAGGUGGAAAA | | [1912-1934] 3′UTR |
| 763 | UUUCUGGCCUUUGGAGAAGUGAU | AUCACUUCUCCAAAGGCCAGAAA | | [954-976] 3′UTR |
| 764 | UUCUGCAUAGAUCCCAUUUUUGU | ACAAAAAUGGGAUCUAUGCAGAA | | [994-1016] 3′UTR |
| 765 | UUUCUGCAUAGAUCCCAUUUUUG | CAAAAAUGGGAUCUAUGCAGAAA | | [993-1015] 3′UTR |
| 766 | UUUUCUGCAUAGAUCCCAUUUUU | AAAAAUGGGAUCUAUGCAGAAAA | | [992-1014] 3′UTR |
| 767 | GAACCCAACCUCAACGAGGUAAU | AUUACCUCGUUGAGGUUGGGUUC | Chimp | [324-346] ORF |
| 768 | AGAAACUGACCCAGAGAAUUGCU | AGCAAUUCUCUGGGUCAGUUUCU | Chin, GP, Chimp, Rat, Ms | [448-470] ORF |
| 769 | UUCUUGGUGACUUCCUCACUCUA | UAGAGUGAGGAAGUCACCAAGAA | | [1379-1401] 3′UTR |
| 770 | CACUAGGGAAUAAUAAAGGCCUU | AAGGCCUUUAUUAUUCCCUAGUG | | [1933-1955] 3′UTR |
| 771 | CCUGUUAUGCUUACAAAAUGGUG | CACCAUUUUGUAAGCAUAACAGG | | [2480-2502] 3′UTR |
| 772 | AAAGUAGAAGCCCAUUUGAGUUU | AAACUCAAAUGGGCUUCUACUUU | | [1048-1070] 3′UTR |
| 773 | AAAAGUAGAAGCCCAUUUGAGUU | AACUCAAAUGGGCUUCUACUUUU | | [1047-1069] 3′UTR |
| 774 | CAAAAGUAGAAGCCCAUUUGAGU | ACUCAAAUGGGCUUCUACUUUUG | | [1046-1068] 3′UTR |
| 775 | GCAAAAGUAGAAGCCCAUUUGAG | CUCAAAUGGGCUUCUACUUUUGC | | [1045-1067] 3′UTR |
| 776 | AGCAAAAGUAGAAGCCCAUUUGA | UCAAAUGGGCUUCUACUUUUGCU | | [1044-1066] 3′UTR |
| 777 | GAUUUUGACUACUGGGAUUAUGU | ACAUAAUCCCAGUAGUCAAAAUC | Dog, Chimp | [294-316] ORF |
| 778 | UGAUUUUGACUACUGGGAUUAUG | CAUAAUCCCAGUAGUCAAAAUCA | Dog, Chimp | [293-315] ORF |
| 779 | GUGAUUUUGACUACUGGGAUUAU | AUAAUCCCAGUAGUCAAAAUCAC | Dog, Chimp | [292-314] ORF |
| 780 | AGUGAUUUUGACUACUGGGAUUA | UAAUCCCAGUAGUCAAAAUCACU | Dog, Chimp | [291-313] ORF |
| 781 | AAGUGAUUUUGACUACUGGGAUU | AAUCCCAGUAGUCAAAAUCACUU | Dog, Chimp | [290-312] ORF |
| 782 | UGAUGGCUUAUGGAAGGCUGUUA | UAACAGCCUUCCAUAAGCCAUCA | | [2501-2523] 3′UTR |
| 783 | UGUUGUCCUUUUUCCACUAACAG | CUGUUAGUGGAAAAAGGACAACA | | [2439-2461] 3′UTR |
| 784 | CUGUUGUCCUUUUUCCACUAACA | UGUUAGUGGAAAAAGGACAACAG | | [2438-2460] 3′UTR |
| 785 | ACUGUUGUCCUUUUUCCACUAAC | GUUAGUGGAAAAAGGACAACAGU | | [2437-2459] 3′UTR |
| 786 | AACUGUUGUCCUUUUUCCACUAA | UUAGUGGAAAAAGGACAACAGUU | | [2436-2458] 3′UTR |
| 787 | GAACUGUUGUCCUUUUUCCACUA | UAGUGGAAAAAGGACAACAGUUC | | [2435-2457] 3′UTR |
| 788 | GACCGGCGUAGGGACAGAUGUAU | AUACAUCUGUCCCUACGCCGGUC | | [2140-2162] 3′UTR |
| 789 | AGUGUAGAUUUUCUGCAUAGAUC | GAUCUAUGCAGAAAAUCUACACU | | [984-1006] 3′UTR |
| 790 | UAGUGUAGAUUUUCUGCAUAGAU | AUCUAUGCAGAAAAUCUACACUA | | [983-1005] 3′UTR |
| 791 | AUAGUGUAGAUUUUCUGCAUAGA | UCUAUGCAGAAAAUCUACACUAU | | [982-1004] 3′UTR |
| 792 | AAUAGUGUAGAUUUUCUGCAUAG | CUAUGCAGAAAAUCUACACUAUU | | [981-1003] 3′UTR |
| 793 | AAAUAGUGUAGAUUUUCUGCAUA | UAUGCAGAAAAUCUACACUAUUU | | [980-1002] 3′UTR |
| 794 | ACCUUGGAUACCUGUCACUAGGG | CCCUAGUGACAGGUAUCCAAGGU | | [1918-1940] 3′UTR |
| 795 | CACCUUGGAUACCUGUCACUAGG | CCUAGUGACAGGUAUCCAAGGUG | | [1917-1939] 3′UTR |
| 796 | CACCCAGAUUUUUUCCACCUUGG | CCAAGGUGGAAAAAAUCUGGGUG | | [1902-1924] 3′UTR |
| 797 | GCACCCAGAUUUUUUCCACCUUG | CAAGGUGGAAAAAAUCUGGGUGC | | [1901-1923] 3′UTR |
| 798 | GAUAGGAAAUUAGUUCUGAGAUC | GAUCUCAGAACUAAUUUCCUAUC | | [1601-1623] 3′UTR |
| 799 | GGAUAGGAAAUUAGUUCUGAGAU | AUCUCAGAACUAAUUUCCUAUCC | | [1600-1622] 3′UTR |
| 800 | AGGAUAGGAAAUUAGUUCUGAGA | UCUCAGAACUAAUUUCCUAUCCU | | [1599-1621] 3′UTR |
| 801 | GAGGAUAGGAAAUUAGUUCUGAG | CUCAGAACUAAUUUCCUAUCCUC | | [1598-1620] 3′UTR |
| 802 | UGAGGAUAGGAAAUUAGUUCUGA | UCAGAACUAAUUUCCUAUCCUCA | | [1597-1619] 3′UTR |
| 803 | ACCUGCCCUAAAUAAGAAACCCC | GGGGUUUCUUAUUUAGGGCAGGU | | [870-892] 3′UTR |
| 804 | CAGCUAAAGUCAUUUGUAGUUUG | CAAACUACAAAUGACUUUAGCUG | | [843-865] 3′UTR |
| 805 | UCAGCUAAAGUCAUUUGUAGUUU | AAACUACAAAUGACUUUAGCUGA | | [842-864] 3′UTR |
| 806 | GUCAGCUAAAGUCAUUUGUAGUU | AACUACAAAUGACUUUAGCUGAC | | [841-863] 3′UTR |
| 807 | AGUCAGCUAAAGUCAUUUGUAGU | ACUACAAAUGACUUUAGCUGACU | | [840-862] 3′UTR |
| 808 | UAGUCAGCUAAAGUCAUUUGUAG | CUACAAAUGACUUUAGCUGACUA | | [839-861] 3′UTR |
| 809 | GGCUUUUUUUUCUCUAAGUUUUC | GAAAACUUAGAGAAAAAAAAGCC | | [1153-1175] 3′UTR |
| 810 | UGGCUUUUUUUUCUCUAAGUUUU | AAAACUUAGAGAAAAAAAAGCCA | | [1152-1174] 3′UTR |
| 811 | AUGGCUUUUUUUUCUCUAAGUUU | AAACUUAGAGAAAAAAAAGCCAU | | [1151-1173] 3′UTR |
| 812 | UAUGGCUUUUUUUUCUCUAAGUU | AACUUAGAGAAAAAAAAGCCAUA | | [1150-1172] 3′UTR |
| 813 | AUAUGGCUUUUUUUUCUCUAAGU | ACUUAGAGAAAAAAAAGCCAUAU | | [1149-1171] 3′UTR |
| 814 | UAUGCACGUGAACUUGGAAAUUG | CAAUUUCCAAGUUCACGUGCAUA | Dog, Chin, GP, Rat | [524-546] ORF |
| 815 | UUAUGCACGUGAACUUGGAAAUU | AAUUUCCAAGUUCACGUGCAUAA | Dog, Chin, GP, Rat | [523-545] ORF |
| 816 | GUUAUGCACGUGAACUUGGAAAU | AUUUCCAAGUUCACGUGCAUAAC | Dog, Chin, GP, Rat | [522-544] ORF |
| 817 | UGUUAUGCACGUGAACUUGGAAA | UUUCCAAGUUCACGUGCAUAACA | Dog, Chin, GP, Rat | [521-543] ORF |
| 818 | GUGUUAUGCACGUGAACUUGGAA | UUCCAAGUUCACGUGCAUAACAC | Dog, Chin, GP, Rat | [520-542] ORF |
| 819 | AUGGACUAGCUUCAGGGACUUUU | AAAAGUCCCUGAAGCUAGUCCAU | Chimp | [641-663] ORF |
| 820 | CGUUGACCAUGGUUGCAACUGGC | GCCAGUUGCAACCAUGGUCAACG | Chimp, Rat, Ms | [196-218] 5′UTR + ORF |
| 821 | CCGUUGACCAUGGUUGCAACUGG | CCAGUUGCAACCAUGGUCAACGG | Chimp, Rat, Ms | [195-217] 5′UTR + ORF |
| 822 | GCCGUUGACCAUGGUUGCAACUG | CAGUUGCAACCAUGGUCAACGGC | Chimp, Rat, Ms | [194-216] 5′UTR + ORF |
| 823 | AGCCGUUGACCAUGGUUGCAACU | AGUUGCAACCAUGGUCAACGGCU | Chimp, Rat, Ms | [193-215] 5′UTR + ORF |
| 824 | GAGCCGUUGACCAUGGUUGCAAC | GUUGCAACCAUGGUCAACGGCUC | Chimp, Rat, Ms | [192-214] 5′UTR + ORF |
| 825 | UGCAUGUCUAUUGUUAAGCUCCA | UGGAGCUUAACAAUAGACAUGCA | | [2337-2359] 3′UTR |
| 826 | CAAUUUACGAAGUCUGCAUUGGC | GCCAAUGCAGACUUCGUAAAUUG | | [1815-1837] 3′UTR |
| 827 | UCAAUUUACGAAGUCUGCAUUGG | CCAAUGCAGACUUCGUAAAUUGA | | [1814-1836] 3′UTR |
| 828 | GUCAAUUUACGAAGUCUGCAUUG | CAAUGCAGACUUCGUAAAUUGAC | | [1813-1835] 3′UTR |
| 829 | GGUCAAUUUACGAAGUCUGCAUU | AAUGCAGACUUCGUAAAUUGACC | | [1812-1834] 3′UTR |
| 830 | GGGUCAAUUUACGAAGUCUGCAU | AUGCAGACUUCGUAAAUUGACCC | | [1811-1833] 3′UTR |
| 831 | CUAGUCAGCUAAAGUCAUUUGUA | UACAAAUGACUUUAGCUGACUAG | | [838-860] 3′UTR |
| 832 | AAAGCUGGAUAGGAUUGUGUGUG | CACACACAAUCCUAUCCAGCUUU | Chin, GP, Chimp, Rat | [560-582] ORF |
| 833 | AAAAGCUGGAUAGGAUUGUGUGU | ACACACAAUCCUAUCCAGCUUUU | Chin, GP, Chimp, Rat | [559-581] ORF |
| 834 | GUACAGCCUAGAGAAUGAAACUC | GAGUUUCAUUCUCUAGGCUGUAC | | [1857-1879] 3′UTR |
| 835 | GAUUCUAGCGUCGUACCUACUUU | AAAGUAGGUACGACGCUAGAAUC | | [582-604] ORF |
| 836 | UGAUUCUAGCGUCGUACCUACUU | AAGUAGGUACGACGCUAGAAUCA | | [581-603] ORF |
| 837 | GUGAUUCUAGCGUCGUACCUACU | AGUAGGUACGACGCUAGAAUCAC | | [580-602] ORF |
| 838 | UGUGAUUCUAGCGUCGUACCUAC | GUAGGUACGACGCUAGAAUCACA | | [579-601] ORF |
| 839 | GAUCUAGUCCCUCUCUGAUUCAC | GUGAAUCAGAGAGGGACUAGAUC | | [1620-1642] 3′UTR |
| 840 | CUAACAAACUAAACUCUUCAAAU | AUUUGAAGAGUUUAGUUUGUUAG | | [2251-2273] 3′UTR |
| 841 | UCUAACAAACUAAACUCUUCAAA | UUUGAAGAGUUUAGUUUGUUAGA | | [2250-2272] 3′UTR |
| 842 | UUCUAACAAACUAAACUCUUCAA | UUGAAGAGUUUAGUUUGUUAGAA | | [2249-2271] 3′UTR |
| 843 | GACUCAAAUUUGAAGGGUUUUUA | UAAAAACCCUUCAAAUUUGAGUC | | [1257-1279] 3′UTR |
| 844 | UGACUCAAAUUUGAAGGGUUUUU | AAAAACCCUUCAAAUUUGAGUCA | | [1256-1278] 3′UTR |
| 845 | CUGACUCAAAUUUGAAGGGUUUU | AAAACCCUUCAAAUUUGAGUCAG | | [1255-1277] 3′UTR |
| 846 | CCUGACUCAAAUUUGAAGGGUUU | AAACCCUUCAAAUUUGAGUCAGG | | [1254-1276] 3′UTR |
| 847 | UCCUGACUCAAAUUUGAAGGGUU | AACCCUUCAAAUUUGAGUCAGGA | | [1253-1275] 3′UTR |
| 848 | UCCACUCAACAAUGUUCAAUUCA | UGAAUUGAACAUUGUUGAGUGGA | | [2027-2049] 3′UTR |
| 849 | CUCCACUCAACAAUGUUCAAUUC | GAAUUGAACAUUGUUGAGUGGAG | | [2026-2048] 3′UTR |
| 850 | CCUCCACUCAACAAUGUUCAAUU | AAUUGAACAUUGUUGAGUGGAGG | | [2025-2047] 3′UTR |
| 851 | GCCUCCACUCAACAAUGUUCAAU | AUUGAACAUUGUUGAGUGGAGGC | | [2024-2046] 3′UTR |
| 852 | AGCCUCCACUCAACAAUGUUCAA | UUGAACAUUGUUGAGUGGAGGCU | | [2023-2045] 3′UTR |
| 853 | UGUAGAUUUUCUGCAUAGAUCCC | GGGAUCUAUGCAGAAAAUCUACA | | [986-1008] 3′UTR |
| 854 | GUGUAGAUUUUCUGCAUAGAUCC | GGAUCUAUGCAGAAAAUCUACAC | | [985-1007] 3′UTR |
| 855 | GCUAUGGAGAUAUGGUUUAUAGU | ACUAUAAACCAUAUCUCCAUAGC | | [1836-1858] 3′UTR |
| 856 | GGCUAUGGAGAUAUGGUUUAUAG | CUAUAAACCAUAUCUCCAUAGCC | | [1835-1857] 3′UTR |
| 857 | UGGCUAUGGAGAUAUGGUUUAUA | UAUAAACCAUAUCUCCAUAGCCA | | [1834-1856] 3′UTR |
| 858 | UUGGCUAUGGAGAUAUGGUUUAU | AUAAACCAUAUCUCCAUAGCCAA | | [1833-1855] 3′UTR |
| 859 | AUUGGCUAUGGAGAUAUGGUUUA | UAAACCAUAUCUCCAUAGCCAAU | | [1832-1854] 3′UTR |
| 860 | GUAUACUACCACUUUGAAUUAUU | AAUAAUUCAAAGUGGUAGUAUAC | | [1783-1805] 3′UTR |
| 861 | UGUAUACUACCACUUUGAAUUAU | AUAAUUCAAAGUGGUAGUAUACA | | [1782-1804] 3′UTR |
| 862 | CUGUAUACUACCACUUUGAAUUA | UAAUUCAAAGUGGUAGUAUACAG | | [1781-1803] 3′UTR |
| 863 | GCUGUAUACUACCACUUUGAAUU | AAUUCAAAGUGGUAGUAUACAGC | | [1780-1802] 3′UTR |
| 864 | AGCUGUAUACUACCACUUUGAAU | AUUCAAAGUGGUAGUAUACAGCU | | [1779-1801] 3′UTR |
| 865 | AGAGCCGUUGACCAUGGUUGCAA | UUGCAACCAUGGUCAACGGCUCU | Chimp, Rat, Ms | [191-213] 5′UTR + ORF |
| 866 | GAAUUAUUGAAACGGGUCAAUUU | AAAUUGACCCGUUUCAAUAAUUC | | [1798-1820] 3′UTR |
| 867 | UGAAUUAUUGAAACGGGUCAAUU | AAUUGACCCGUUUCAAUAAUUCA | | [1797-1819] 3′UTR |
| 868 | UUGAAUUAUUGAAACGGGUCAAU | AUUGACCCGUUUCAAUAAUUCAA | | [1796-1818] 3′UTR |
| 869 | UUUGAAUUAUUGAAACGGGUCAA | UUGACCCGUUUCAAUAAUUCAAA | | [1795-1817] 3′UTR |
| 870 | CUUUGAAUUAUUGAAACGGGUCA | UGACCCGUUUCAAUAAUUCAAAG | | [1794-1816] 3′UTR |
| 871 | AGCCCAUUUGAGUUUUACAUUUG | CAAAUGUAAAACUCAAAUGGGCU | | [1056-1078] 3′UTR |
| 872 | AAGCCCAUUUGAGUUUUACAUUU | AAAUGUAAAACUCAAAUGGGCUU | | [1055-1077] 3′UTR |
| 873 | AGGAUUGUGUGUGAUUCUAGCGU | ACGCUAGAAUCACACACAAUCCU | Chimp | [570-592] ORF |
| 874 | UAGGAUUGUGUGUGAUUCUAGCG | CGCUAGAAUCACACACAAUCCUA | Chimp | [569-591] ORF |
| 875 | AUAGGAUUGUGUGUGAUUCUAGC | GCUAGAAUCACACACAAUCCUAU | Chimp | [568-590] ORF |
| 876 | GAUAGGAUUGUGUGUGAUUCUAG | CUAGAAUCACACACAAUCCUAUC | Chimp | [567-589] ORF |
| 877 | CAAAUGCUUGGAAAGAUACUACA | UGUAGUAUCUUUCCAAGCAUUUG | | [2269-2291] 3′UTR |
| 878 | CAUUGGCUAUGGAGAUAUGGUUU | AAACCAUAUCUCCAUAGCCAAUG | | [1831-1853] 3′UTR |
| 879 | CUUUUUCCACUAACAGUUAUCUU | AAGAUAACUGUUAGUGGAAAAAG | | [2446-2468] 3′UTR |
| 880 | CCUUUUUCCACUAACAGUUAUCU | AGAUAACUGUUAGUGGAAAAAGG | | [2445-2467] 3′UTR |
| 881 | UCCUUUUUCCACUAACAGUUAUC | GAUAACUGUUAGUGGAAAAAGGA | | [2444-2466] 3′UTR |
| 882 | GUCCUUUUUCCACUAACAGUUAU | AUAACUGUUAGUGGAAAAAGGAC | | [2443-2465] 3′UTR |
| 883 | UGUCCUUUUUCCACUAACAGUUA | UAACUGUUAGUGGAAAAAGGACA | | [2442-2464] 3′UTR |
| 884 | UGCACCCAGAUUUUUUCCACCUU | AAGGUGGAAAAAAUCUGGGUGCA | | [1900-1922] 3′UTR |
| 885 | GGUCCUAAAAAGGGAAAAUAUAU | AUAUAUUUUCCCUUUUUAGGACC | | [778-800] ORF+3′UTR |
| 886 | GCUUCAGGGACUUUUUCUUUAGU | ACUAAAGAAAAAGUCCCUGAAGC | Chimp | [649-671] ORF |
| 887 | AGCUUCAGGGACUUUUUCUUUAG | CUAAAGAAAAAGUCCCUGAAGCU | Chimp | [648-670] ORF |
| 888 | UAGCUUCAGGGACUUUUUCUUUA | UAAAGAAAAAGUCCCUGAAGCUA | Chimp | [647-669] ORF |
| 889 | CUAAUGUUUUAAAGAGGCAACAA | UUGUUGCCUCUUUAAAACAUUAG | | [1399-1421] 3′UTR |
| 890 | GGAAUAAUAAAGGCCUUAUUUUU | AAAAAUAAGGCCUUUAUUAUUCC | | [1939-1961] 3′UTR |
| 891 | UUGCAUGUCUAUUGUUAAGCUCC | GGAGCUUAACAAUAGACAUGCAA | | [2336-2358] 3′UTR |
| 892 | UUUGCAUGUCUAUUGUUAAGCUC | GAGCUUAACAAUAGACAUGCAAA | | [2335-2357] 3′UTR |
| 893 | UUUUGCAUGUCUAUUGUUAAGCU | AGCUUAACAAUAGACAUGCAAAA | | [2334-2356] 3′UTR |
| 894 | UAGCUGUAUACUACCACUUUGAA | UUCAAAGUGGUAGUAUACAGCUA | | [1778-1800] 3′UTR |
| 895 | GUAGCUGUAUACUACCACUUUGA | UCAAAGUGGUAGUAUACAGCUAC | | [1777-1799] 3′UTR |
| 896 | GUAGAUUUUCUGCAUAGAUCCCA | UGGGAUCUAUGCAGAAAAUCUAC | | [987-1009] 3′UTR |
| 897 | UGUGUUAUGCACGUGAACUUGGA | UCCAAGUUCACGUGCAUAACACA | Dog, Chin, GP, Rat, Ms | [519-541] ORF |
| 898 | GAAACUGACCCAGAGAAUUGCUC | GAGCAAUUCUCUGGGUCAGUUUC | Chin, GP, Chimp, Rat, Ms | [449-471] ORF |
| 899 | GAAACUCACCGUCCAGAUAACCA | UGGUUAUCUGGACGGUGAGUUUC | | [1873-1895] 3′UTR |
| 900 | UGAAACUCACCGUCCAGAUAACC | GGUUAUCUGGACGGUGAGUUUCA | | [1872-1894] 3′UTR |
| 901 | AUGAAACUCACCGUCCAGAUAAC | GUUAUCUGGACGGUGAGUUUCAU | | [1871-1893] 3′UTR |
| 902 | AAUGAAACUCACCGUCCAGAUAA | UUAUCUGGACGGUGAGUUUCAUU | | [1870-1892] 3′UTR |
| 903 | GAAACAGAGCCGUUGACCAUGGU | ACCAUGGUCAACGGCUCUGUUUC | Dog, Chimp, Rat, Ms | [186-208] 5′UTR + ORF |
| 904 | GGAAACAGAGCCGUUGACCAUGG | CCAUGGUCAACGGCUCUGUUUCC | Dog, Chimp, Rat, Ms | [185-207] 5′UTR + ORF |
| 905 | AGGAAACAGAGCCGUUGACCAUG | CAUGGUCAACGGCUCUGUUUCCU | Dog, Chimp, Rat, Ms | [184-206] 5′UTR + ORF |
| 906 | AAGGAAACAGAGCCGUUGACCAU | AUGGUCAACGGCUCUGUUUCCUU | Dog, Chimp, Rat, Ms | [183-205] 5′UTR + ORF |
| 907 | GAAGGAAACAGAGCCGUUGACCA | UGGUCAACGGCUCUGUUUCCUUC | Dog, Chimp, Rat, Ms | [182-204] 5′UTR |
| 908 | UACAGCCUAGAGAAUGAAACUCA | UGAGUUUCAUUCUCUAGGCUGUA | | [1858-1880] 3′UTR |
| 909 | GGAGAACUCUGAUCCUCAGCUCA | UGAGCUGAGGAUCAGAGUUCUCC | | [697-719] ORF |
| 910 | AGGAGAACUCUGAUCCUCAGCUC | GAGCUGAGGAUCAGAGUUCUCCU | | [696-718] ORF |
| 911 | CAGGAGAACUCUGAUCCUCAGCU | AGCUGAGGAUCAGAGUUCUCCUG | | [695-717] ORF |
| 912 | UCAGGAGAACUCUGAUCCUCAGC | GCUGAGGAUCAGAGUUCUCCUGA | | [694-716] ORF |
| 913 | UUCAGGAGAACUCUGAUCCUCAG | CUGAGGAUCAGAGUUCUCCUGAA | | [693-715] ORF |
| 914 | UUCAGGGACUUUUUCUUUAGUAG | CUACUAAAGAAAAAGUCCCUGAA | | [651-673] ORF |
| 915 | CUUCAGGGACUUUUUCUUUAGUA | UACUAAAGAAAAAGUCCCUGAAG | | [650-672] ORF |
| 916 | AGUUGAUUACUCUUCCAUUGAGU | ACUCAAUGGAAGAGUAAUCAACU | | [1558-1580] 3′UTR |
| 917 | UAGUUGAUUACUCUUCCAUUGAG | CUCAAUGGAAGAGUAAUCAACUA | | [1557-1579] 3′UTR |
| 918 | GUAGUUGAUUACUCUUCCAUUGA | UCAAUGGAAGAGUAAUCAACUAC | | [1556-1578] 3′UTR |
| 919 | UGUAGUUGAUUACUCUUCCAUUG | CAAUGGAAGAGUAAUCAACUACA | | [1555-1577] 3′UTR |
| 920 | GUGUAGUUGAUUACUCUUCCAUU | AAUGGAAGAGUAAUCAACUACAC | | [1554-1576] 3′UTR |
| 921 | GGAACAACAGUGAUUGAAGGGUC | GACCCUUCAAUCACUGUUGUUCC | | [759-781] ORF |
| 922 | UGGAACAACAGUGAUUGAAGGGU | ACCCUUCAAUCACUGUUGUUCCA | | [758-780] ORF |
| 923 | UUGGAACAACAGUGAUUGAAGGG | CCCUUCAAUCACUGUUGUUCCAA | | [757-779] ORF |
| 924 | AUUGGAACAACAGUGAUUGAAGG | CCUUCAAUCACUGUUGUUCCAAU | | [756-778] ORF |
| 925 | GAUUGGAACAACAGUGAUUGAAG | CUUCAAUCACUGUUGUUCCAAUC | | [755-777] ORF |
| 926 | CAAAGCCAAUCUUUAUAGAAUUG | CAAUUCUAUAAAGAUUGGCUUUG | | [2290-2312] 3′UTR |
| 927 | ACAAAGCCAAUCUUUAUAGAAUU | AAUUCUAUAAAGAUUGGCUUUGU | | [2289-2311] 3′UTR |
| 928 | UACAAAGCCAAUCUUUAUAGAAU | AUUCUAUAAAGAUUGGCUUUGUA | | [2288-2310] 3′UTR |
| 929 | CUACAAAGCCAAUCUUUAUAGAA | UUCUAUAAAGAUUGGCUUUGUAG | | [2287-2309] 3′UTR |
| 930 | ACUACAAAGCCAAUCUUUAUAGA | UCUAUAAAGAUUGGCUUUGUAGU | | [2286-2308] 3′UTR |
| 931 | AAACGGGUCAAUUUACGAAGUCU | AGACUUCGUAAAUUGACCCGUUU | | [1807-1829] 3′UTR |
| 932 | GCAAGGCUUCUUGGGCAUCGAUG | CAUCGAUGCCCAAGAAGCCUUGC | | [2410-2432] 3′UTR |
| 933 | GGCAAGGCUUCUUGGGCAUCGAU | AUCGAUGCCCAAGAAGCCUUGCC | | [2409-2431] 3′UTR |
| 934 | GGGCAAGGCUUCUUGGGCAUCGA | UCGAUGCCCAAGAAGCCUUGCCC | | [2408-2430] 3′UTR |
| 935 | UCCCUGAGAAACUGACCCAGAGA | UCUCUGGGUCAGUUUCUCAGGGA | Dog, Chin, GP, | [442-464] ORF |
| | | | Chimp, Rat, Ms | |
| 936 | GUCCCUGAGAAACUGACCCAGAG | CUCUGGGUCAGUUUCUCAGGGAC | Dog, Chin, GP, | [441-463] ORF |
| | | | Chimp, Rat, Ms | |
| 937 | UGUCCCUGAGAAACUGACCCAGA | UCUGGGUCAGUUUCUCAGGGACA | Dog, Chin, GP, | [440-462] ORF |
| | | | Chimp, Rat, Ms | |
| 938 | CUGCAUUGGCUAUGGAGAUAUGG | CCAUAUCUCCAUAGCCAAUGCAG | | [1828-1850] 3′UTR |
| 939 | UCUGCAUUGGCUAUGGAGAUAUG | CAUAUCUCCAUAGCCAAUGCAGA | | [1827-1849] 3′UTR |
| 940 | GUCUGCAUUGGCUAUGGAGAUAU | AUAUCUCCAUAGCCAAUGCAGAC | | [1826-1848] 3′UTR |
| 941 | AGUCUGCAUUGGCUAUGGAGAUA | UAUCUCCAUAGCCAAUGCAGACU | | [1825-1847] 3′UTR |
| 942 | AAGUCUGCAUUGGCUAUGGAGAU | AUCUCCAUAGCCAAUGCAGACUU | | [1824-1846] 3′UTR |
| 943 | GAUUGUGUGUGAUUCUAGCGUCG | CGACGCUAGAAUCACACACAAUC | | [572-594] ORF |
| 944 | GGAUUGUGUGUGAUUCUAGCGUC | GACGCUAGAAUCACACACAAUCC | | [571-593] ORF |
| 945 | GCUAGUCAGCUAAAGUCAUUUGU | ACAAAUGACUUUAGCUGACUAGC | | [837-859] 3′UTR |
| 946 | AGCUAGUCAGCUAAAGUCAUUUG | CAAAUGACUUUAGCUGACUAGCU | | [836-858] 3′UTR |
| 947 | CAGCUAGUCAGCUAAAGUCAUUU | AAAUGACUUUAGCUGACUAGCUG | | [835-857] 3′UTR |
| 948 | UCAGCUAGUCAGCUAAAGUCAUU | AAUGACUUUAGCUGACUAGCUGA | | [834-856] 3′UTR |
| 949 | UUCAGCUAGUCAGCUAAAGUCAU | AUGACUUUAGCUGACUAGCUGAA | | [833-855] 3′UTR |
| 950 | UGUAUUCAUCCUGGUGUUACUGA | UCAGUAACACCAGGAUGAAUACA | | [2158-2180] 3′UTR |
| 951 | AUGUAUUCAUCCUGGUGUUACUG | CAGUAACACCAGGAUGAAUACAU | | [2157-2179] 3′UTR |
| 952 | GAUGUAUUCAUCCUGGUGUUACU | AGUAACACCAGGAUGAAUACAUC | | [2156-2178] 3′UTR |
| 953 | GGGUAGUAAAACUAUUCAGCUAG | CUAGCUGAAUAGUUUUACUACCC | | [819-841] 3′UTR |
| 954 | UGGGUAGUAAAACUAUUCAGCUA | UAGCUGAAUAGUUUUACUACCCA | | [818-840] 3′UTR |
| 955 | UUGGGUAGUAAAACUAUUCAGCU | AGCUGAAUAGUUUUACUACCCAA | | [817-839] 3′UTR |
| 956 | AUUGGGUAGUAAAACUAUUCAGC | GCUGAAUAGUUUUACUACCCAAU | | [816-838] 3′UTR |
| 957 | UGAUUGGAACAACAGUGAUUGAA | UUCAAUCACUGUUGUUCCAAUCA | | [754-776] ORF |
| 958 | CUGAUUGGAACAACAGUGAUUGA | UCAAUCACUGUUGUUCCAAUCAG | | [753-775] ORF |
| 959 | ACUGAUUGGAACAACAGUGAUUG | CAAUCACUGUUGUUCCAAUCAGU | | [752-774] ORF |
| 960 | CACUGAUUGGAACAACAGUGAUU | AAUCACUGUUGUUCCAAUCAGUG | | [751-773] ORF |
| 961 | CAGUUAUCUUUGACUCUCUUGCC | GGCAAGAGAGUCAAAGAUAACUG | | [2459-2481] 3′UTR |
| 962 | ACAGUUAUCUUUGACUCUCUUGC | GCAAGAGAGUCAAAGAUAACUGU | | [2458-2480] 3′UTR |
| 963 | AACAGUUAUCUUUGACUCUCUUG | CAAGAGAGUCAAAGAUAACUGUU | | [2457-2479] 3′UTR |
| 964 | UAACAGUUAUCUUUGACUCUCUU | AAGAGAGUCAAAGAUAACUGUUA | | [2456-2478] 3′UTR |
| 965 | CUAACAGUUAUCUUUGACUCUCU | AGAGAGUCAAAGAUAACUGUUAG | | [2455-2477] 3′UTR |
| 966 | CACAAUUUGGUUUCAGGUAGGCU | AGCCUACCUGAAACCAAAUUGUG | | [1083-1105] 3′UTR |
| 967 | CCACAAUUUGGUUUCAGGUAGGC | GCCUACCUGAAACCAAAUUGUGG | | [1082-1104] 3′UTR |
| 968 | UCCACAAUUUGGUUUCAGGUAGG | CCUACCUGAAACCAAAUUGUGGA | | [1081-1103] 3′UTR |
| 969 | UUCCACAAUUUGGUUUCAGGUAG | CUACCUGAAACCAAAUUGUGGAA | | [1080-1102] 3′UTR |
| 970 | AUUCCACAAUUUGGUUUCAGGUA | UACCUGAAACCAAAUUGUGGAAU | | [1079-1101] 3′UTR |
| 971 | GAGAAGUGAUUCAAAAUAGUGUA | UACACUAUUUUGAAUCACUUCUC | | [967-989] 3′UTR |
| 972 | GCUUUUCUGGGAAUUGAAGUAUC | GAUACUUCAAUUCCCAGAAAAGC | | [1727-1749] 3′UTR |
| 973 | GAAGUCUGCAUUGGCUAUGGAGA | UCUCCAUAGCCAAUGCAGACUUC | | [1823-1845] 3′UTR |
| 974 | UACUACAAAGCCAAUCUUUAUAG | CUAUAAAGAUUGGCUUUGUAGUA | | [2285-2307] 3′UTR |
| 975 | AUACUACAAAGCCAAUCUUUAUA | UAUAAAGAUUGGCUUUGUAGUAU | | [2284-2306] 3′UTR |
| 976 | GAUACUACAAAGCCAAUCUUUAU | AUAAAGAUUGGCUUUGUAGUAUC | | [2283-2305] 3′UTR |
| 977 | AGAUACUACAAAGCCAAUCUUUA | UAAAGAUUGGCUUUGUAGUAUCU | | [2282-2304] 3′UTR |
| 978 | AAAAUAGUGUAGAUUUUCUGCAU | AUGCAGAAAAUCUACACUAUUUU | | [979-1001] 3′UTR |
| 979 | AAGCAAAAGUAGAAGCCCAUUUG | CAAAUGGGCUUCUACUUUUGCUU | | [1043-1065] 3′UTR |
| 980 | UAAGCAAAAGUAGAAGCCCAUUU | AAAUGGGCUUCUACUUUUGCUUA | | [1042-1064] 3′UTR |
| 981 | GUAAGCAAAAGUAGAAGCCCAUU | AAUGGGCUUCUACUUUUGCUUAC | | [1041-1063] 3′UTR |
| 982 | CGGGUCAAUUUACGAAGUCUGCA | UGCAGACUUCGUAAAUUGACCCG | | [1810-1832] 3′UTR |
| 983 | ACGGGUCAAUUUACGAAGUCUGC | GCAGACUUCGUAAAUUGACCCGU | | [1809-1831] 3′UTR |
| 984 | AACGGGUCAAUUUACGAAGUCUG | CAGACUUCGUAAAUUGACCCGUU | | [1808-1830] 3′UTR |
| 985 | UCACUGAUUGGAACAACAGUGAU | AUCACUGUUGUUCCAAUCAGUGA | | [750-772] ORF |
| 986 | AAUUCAGCAAGGCUUUCAUAUCC | GGAUAUGAAAGCCUUGCUGAAUU | | [2044-2066] 3′UTR |
| 987 | CAAUUCAGCAAGGCUUUCAUAUC | GAUAUGAAAGCCUUGCUGAAUUG | | [2043-2065] 3′UTR |
| 988 | UCAAUUCAGCAAGGCUUUCAUAU | AUAUGAAAGCCUUGCUGAAUUGA | | [2042-2064] 3′UTR |
| 989 | UUCAAUUCAGCAAGGCUUUCAUA | UAUGAAAGCCUUGCUGAAUUGAA | | [2041-2063] 3′UTR |
| 990 | GUUCAAUUCAGCAAGGCUUUCAU | AUGAAAGCCUUGCUGAAUUGAAC | | [2040-2062] 3′UTR |
| 991 | AUGAAUACCUGUGAGGAUAGGAA | UUCCUAUCCUCACAGGUAUUCAU | | [1586-1608] 3′UTR |
| 992 | UUAUUUCAUGAUUGGGUAGUAAA | UUUACUACCCAAUCAUGAAAUAA | | [806-828] 3′UTR |
| 993 | AGAGAGCCUGCUAAGUGAUUUUG | CAAAAUCACUUAGCAGGCUCUCU | Chimp | [278-300] ORF |
| 994 | UUAACCCUAGGUAAGAGUAAAUG | CAUUUACUCUUACCUAGGGUUAA | | [1320-1342] 3′UTR |
| 995 | CUUAACCCUAGGUAAGAGUAAAU | AUUUACUCUUACCUAGGGUUAAG | | [1319-1341] 3′UTR |
| 996 | GCUUAACCCUAGGUAAGAGUAAA | UUUACUCUUACCUAGGGUUAAGC | | [1318-1340] 3′UTR |
| 997 | AGCUUAACCCUAGGUAAGAGUAA | UUACUCUUACCUAGGGUUAAGCU | | [1317-1339] 3′UTR |
| 998 | AGAACUGUUGUCCUUUUUCCACU | AGUGGAAAAAGGACAACAGUUCU | | [2434-2456] 3′UTR |
| 999 | UAGAACUGUUGUCCUUUUUCCAC | GUGGAAAAAGGACAACAGUUCUA | | [2433-2455] 3′UTR |
| 1000 | GUAGAACUGUUGUCCUUUUUCCA | UGGAAAAAGGACAACAGUUCUAC | | [2432-2454] 3′UTR |
| 1001 | GCAUUUCAGAAUUGCUGGACUGU | ACAGUCCAGCAAUUCUGAAAUGC | Chimp | [244-266] ORF |
| 1002 | AGCAUUUCAGAAUUGCUGGACUG | CAGUCCAGCAAUUCUGAAAUGCU | Chimp | [243-265] ORF |
| 1003 | CAGCAUUUCAGAAUUGCUGGACU | AGUCCAGCAAUUCUGAAAUGCUG | Chimp | [242-264] ORF |
| 1004 | CCAGCAUUUCAGAAUUGCUGGAC | GUCCAGCAAUUCUGAAAUGCUGG | Chimp | [241-263] ORF |
| 1005 | GCCAGCAUUUCAGAAUUGCUGGA | UCCAGCAAUUCUGAAAUGCUGGC | Chimp | [240-262] ORF |
| 1006 | GUACCUACUUUUGAGCUUACACU | AGUGUAAGCUCAAAAGUAGGUAC | | [594-616] ORF |
| 1007 | CGUACCUACUUUUGAGCUUACAC | GUGUAAGCUCAAAAGUAGGUACG | | [593-615] ORF |
| 1008 | UCGUACCUACUUUUGAGCUUACA | UGUAAGCUCAAAAGUAGGUACGA | | [592-614] ORF |
| 1009 | GUCGUACCUACUUUUGAGCUUAC | GUAAGCUCAAAAGUAGGUACGAC | | [591-613] ORF |
| 1010 | GUCUUAUUCCAACUAAGUAGAUC | GAUCUACUUAGUUGGAAUAAGAC | | [1963-1985] 3′UTR |
| 1011 | UGUCUUAUUCCAACUAAGUAGAU | AUCUACUUAGUUGGAAUAAGACA | | [1962-1984] 3′UTR |
| 1012 | UUGUCUUAUUCCAACUAAGUAGA | UCUACUUAGUUGGAAUAAGACAA | | [1961-1983] 3′UTR |
| 1013 | UUUGUCUUAUUCCAACUAAGUAG | CUACUUAGUUGGAAUAAGACAAA | | [1960-1982] 3′UTR |
| 1014 | UUUUGUCUUAUUCCAACUAAGUA | UACUUAGUUGGAAUAAGACAAAA | | [1959-1981] 3′UTR |
| 1015 | UUGUGUUUAAGCAGGAGAACUGC | GCAGUUCUCCUGCUUAAACACAA | Dog, Chimp | [616-638] ORF |
| 1016 | CUUGUGUUUAAGCAGGAGAACUG | CAGUUCUCCUGCUUAAACACAAG | Dog, Chimp | [615-637] ORF |
| 1017 | ACUUGUGUUUAAGCAGGAGAACU | AGUUCUCCUGCUUAAACACAAGU | Dog, Chimp | [614-636] ORF |
| 1018 | CACUUGUGUUUAAGCAGGAGAAC | GUUCUCCUGCUUAAACACAAGUG | Dog, Chimp | [613-635] ORF |
| 1019 | ACACUUGUGUUUAAGCAGGAGAA | UUCUCCUGCUUAAACACAAGUGU | Dog, Chimp | [612-634] ORF |
| 1020 | AACUUGCCAGAAUUUGGUUAAAA | UUUUAACCAAAUUCUGGCAAGUU | GP, Chimp, Rat, Ms | [359-381] ORF |
| 1021 | UCUAAUGUUUUAAAGAGGCAACA | UGUUGCCUCUUUAAAACAUUAGA | | [1398-1420] 3′UTR |
| 1022 | CUCUAAUGUUUUAAAGAGGCAAC | GUUGCCUCUUUAAAACAUUAGAG | | [1397-1419] 3′UTR |
| 1023 | ACUCUAAUGUUUUAAAGAGGCAA | UUGCCUCUUUAAAACAUUAGAGU | | [1396-1418] 3′UTR |
| 1024 | CACUCUAAUGUUUUAAAGAGGCA | UGCCUCUUUAAAACAUUAGAGUG | | [1395-1417] 3′UTR |
| 1025 | CUAAGUUUUCAGAGGAUUUUUUA | UAAAAAAUCCUCUGAAAACUUAG | | [1166-1188] 3′UTR |
| 1026 | UCUAAGUUUUCAGAGGAUUUUUU | AAAAAAUCCUCUGAAAACUUAGA | | [1165-1187] 3′UTR |
| 1027 | CUCUAAGUUUUCAGAGGAUUUUU | AAAAAUCCUCUGAAAACUUAGAG | | [1164-1186] 3′UTR |
| 1028 | UCUCUAAGUUUUCAGAGGAUUUU | AAAAUCCUCUGAAAACUUAGAGA | | [1163-1185] 3′UTR |
| 1029 | UUCUCUAAGUUUUCAGAGGAUUU | AAAUCCUCUGAAAACUUAGAGAA | | [1162-1184] 3′UTR |
| 1030 | UGGUUUAUAGUACAGCCUAGAGA | UCUCUAGGCUGUACUAUAAACCA | | [1848-1870] 3′UTR |
| 1031 | AUGGUUUAUAGUACAGCCUAGAG | CUCUAGGCUGUACUAUAAACCAU | | [1847-1869] 3′UTR |
| 1032 | UAUGGUUUAUAGUACAGCCUAGA | UCUAGGCUGUACUAUAAACCAUA | | [1846-1868] 3′UTR |
| 1033 | AUAUGGUUUAUAGUACAGCCUAG | CUAGGCUGUACUAUAAACCAUAU | | [1845-1867] 3′UTR |
| 1034 | UCCUCUGGUUUCAGGAGAACUCU | AGAGUUCUCCUGAAACCAGAGGA | | [684-706] ORF |
| 1035 | CUCCUCUGGUUUCAGGAGAACUC | GAGUUCUCCUGAAACCAGAGGAG | | [683-705] ORF |
| 1036 | UCUCCUCUGGUUUCAGGAGAACU | AGUUCUCCUGAAACCAGAGGAGA | | [682-704] ORF |
| 1037 | UUCUCCUCUGGUUUCAGGAGAAC | GUUCUCCUGAAACCAGAGGAGAA | | [681-703] ORF |
| 1038 | CUUCUCCUCUGGUUUCAGGAGAA | UUCUCCUGAAACCAGAGGAGAAG | | [680-702] ORF |
| 1039 | UGUUGUUUUAGAUGCCUUUAUAA | UUAUAAAGGCAUCUAAAACAACA | | [1452-1474] 3′UTR |
| 1040 | GUGUUGUUUUAGAUGCCUUUAUA | UAUAAAGGCAUCUAAAACAACAC | | [1451-1473] 3′UTR |
| 1041 | GGUGUUGUUUUAGAUGCCUUUAU | AUAAAGGCAUCUAAAACAACACC | | [1450-1472] 3′UTR |
| 1042 | ACGGUGUUGUUUUAGAUGCCUUU | AAAGGCAUCUAAAACAACACCGU | | [1448-1470] 3′UTR |
| 1043 | UAAGUGAUUUUGACUACUGGGAU | AUCCCAGUAGUCAAAAUCACUUA | Dog, Chimp | [289-311] ORF |
| 1044 | GGUGAUGGCUUAUGGAAGGCUGU | ACAGCCUUCCAUAAGCCAUCACC | | [2499-2521] 3′UTR |
| 1045 | UGGUGAUGGCUUAUGGAAGGCUG | CAGCCUUCCAUAAGCCAUCACCA | | [2498-2520] 3′UTR |
| 1046 | AUGGUGAUGGCUUAUGGAAGGCU | AGCCUUCCAUAAGCCAUCACCAU | | [2497-2519] 3′UTR |
| 1047 | AUUGUCAAGGGUAGUAGCUGUAU | AUACAGCUACUACCCUUGACAAU | | [1764-1786] 3′UTR |
| 1048 | AAUUGUCAAGGGUAGUAGCUGUA | UACAGCUACUACCCUUGACAAUU | | [1763-1785] 3′UTR |
| 1049 | CAAUUGUCAAGGGUAGUAGCUGU | ACAGCUACUACCCUUGACAAUUG | | [1762-1784] 3′UTR |
| 1050 | CGCUUCUCCUCUGGUUUCAGGAG | CUCCUGAAACCAGAGGAGAAGCG | | [678-700] ORF |
| 1051 | UCGCUUCUCCUCUGGUUUCAGGA | UCCUGAAACCAGAGGAGAAGCGA | | [677-699] ORF |
| 1052 | GUCGCUUCUCCUCUGGUUUCAGG | CCUGAAACCAGAGGAGAAGCGAC | | [676-698] ORF |
| 1053 | GGUCGCUUCUCCUCUGGUUUCAG | CUGAAACCAGAGGAGAAGCGACC | | [675-697] ORF |
| 1054 | AGGUCGCUUCUCCUCUGGUUUCA | UGAAACCAGAGGAGAAGCGACCU | | [674-696] ORF |
| 1055 | AUCAAUGUUGUUUUGCAUGUCUA | UAGACAUGCAAAACAACAUUGAU | | [2324-2346] 3′UTR |
| 1056 | UUCUAGCGUCGUACCUACUUUUG | CAAAAGUAGGUACGACGCUAGAA | | [584-606] ORF |
| 1057 | AUUCUAGCGUCGUACCUACUUUU | AAAAGUAGGUACGACGCUAGAAU | | [583-605] ORF |
| 1058 | CCAGAUAACCAUGCAUGCACCCA | UGGGUGCAUGCAUGGUUAUCUGG | | [1885-1907] 3′UTR |
| 1059 | UCCAGAUAACCAUGCAUGCACCC | GGGUGCAUGCAUGGUUAUCUGGA | | [1884-1906] 3′UTR |
| 1060 | GUCCAGAUAACCAUGCAUGCACC | GGUGCAUGCAUGGUUAUCUGGAC | | [1883-1905] 3′UTR |
| 1061 | CGUCCAGAUAACCAUGCAUGCAC | GUGCAUGCAUGGUUAUCUGGACG | | [1882-1904] 3′UTR |
| 1062 | CUUCCAAAAGCCCACACCACCAG | CUGGUGGUGUGGGCUUUUGGAAG | | [1229-1251] 3′UTR |
| 1063 | ACUUCCAAAAGCCCACACCACCA | UGGUGGUGUGGGCUUUUGGAAGU | | [1228-1250] 3′UTR |
| 1064 | AACUUCCAAAAGCCCACACCACC | GGUGGUGUGGGCUUUUGGAAGUU | | [1227-1249] 3′UTR |
| 1065 | AAACUUCCAAAAGCCCACACCAC | GUGGUGUGGGCUUUUGGAAGUUU | | [1226-1248] 3′UTR |
| 1066 | AAAACUUCCAAAAGCCCACACCA | UGGUGUGGGCUUUUGGAAGUUUU | | [1225-1247] 3′UTR |
| 1067 | AGUUAUCUUUGACUCUCUUGCCU | AGGCAAGAGAGUCAAAGAUAACU | | [2460-2482] 3′UTR |
| 1068 | CUUAAGUGUUGAAUACUGUCUUU | AAAGACAGUAUUCAACACUUAAG | | [1492-1514] 3′UTR |
| 1069 | UCUUAAGUGUUGAAUACUGUCUU | AAGACAGUAUUCAACACUUAAGA | | [1491-1513] 3′UTR |
| 1070 | UUCUUAAGUGUUGAAUACUGUCU | AGACAGUAUUCAACACUUAAGAA | | [1490-1512] 3′UTR |
| 1071 | GUUCUUAAGUGUUGAAUACUGUC | GACAGUAUUCAACACUUAAGAAC | | [1489-1511] 3′UTR |
| 1072 | UGUUCUUAAGUGUUGAAUACUGU | ACAGUAUUCAACACUUAAGAACA | | [1488-1510] 3′UTR |
| 1073 | CAUAGCAACUGCAGCUAACAGGC | GCCUGUUAGCUGCAGUUGCUAUG | | [927-949] 3′UTR |
| 1074 | UCAUAGCAACUGCAGCUAACAGG | CCUGUUAGCUGCAGUUGCUAUGA | | [926-948] 3′UTR |
| 1075 | UUCAUAGCAACUGCAGCUAACAG | CUGUUAGCUGCAGUUGCUAUGAA | | [925-947] 3′UTR |
| 1076 | AUUCAUAGCAACUGCAGCUAACA | UGUUAGCUGCAGUUGCUAUGAAU | | [924-946] 3′UTR |
| 1077 | CAUUCAUAGCAACUGCAGCUAAC | GUUAGCUGCAGUUGCUAUGAAUG | | [923-945] 3′UTR |
| 1078 | GAACCCGGCCAGCAUUUCAGAAU | AUUCUGAAAUGCUGGCCGGGUUC | Chimp | [233-255] ORF |
| 1079 | GGCCAAGAUAAAUCAAUGUUGUU | AACAACAUUGAUUUAUCUUGGCC | | [2313-2335] 3′UTR |
| 1080 | AUAUUACGGCAAUAAUGGAACUG | CAGUUCCAUUAUUGCCGUAAUAU | | [1347-1369] 3′UTR |
| 1081 | AAUAUUACGGCAAUAAUGGAACU | AGUUCCAUUAUUGCCGUAAUAUU | | [1346-1368] 3′UTR |
| 1082 | AAAUAUUACGGCAAUAAUGGAAC | GUUCCAUUAUUGCCGUAAUAUUU | | [1345-1367] 3′UTR |
| 1083 | GAAAUAUUACGGCAAUAAUGGAA | UUCCAUUAUUGCCGUAAUAUUUC | | [1344-1366] 3′UTR |
| 1084 | AGAAAUAUUACGGCAAUAAUGGA | UCCAUUAUUGCCGUAAUAUUUCU | | [1343-1365] 3′UTR |
| 1085 | UAAAAAGCUGGAUAGGAUUGUGU | ACACAAUCCUAUCCAGCUUUUUA | Chin, GP, Chimp, Rat | [557-579] ORF |
| 1086 | AUGUUGUUCCUGAACCCAACCUC | GAGGUUGGGUUCAGGAACAACAU | Chimp | [313-335] ORF |
| 1087 | UAUGUUGUUCCUGAACCCAACCU | AGGUUGGGUUCAGGAACAACAUA | Chimp | [312-334] ORF |
| 1088 | UUAUGUUGUUCCUGAACCCAACC | GGUUGGGUUCAGGAACAACAUAA | Chimp | [311-333] ORF |
| 1089 | AUUAUGUUGUUCCUGAACCCAAC | GUUGGGUUCAGGAACAACAUAAU | Chimp | [310-332] ORF |
| 1090 | GAUUAUGUUGUUCCUGAACCCAA | UUGGGUUCAGGAACAACAUAAUC | Chimp | [309-331] ORF |
| 1091 | GGUUUCAGGAGAACUCUGAUCCU | AGGAUCAGAGUUCUCCUGAAACC | | [690-712] ORF |
| 1092 | UGGUUUCAGGAGAACUCUGAUCC | GGAUCAGAGUUCUCCUGAAACCA | | [689-711] ORF |
| 1093 | CUGGUUUCAGGAGAACUCUGAUC | GAUCAGAGUUCUCCUGAAACCAG | | [688-710] ORF |
| 1094 | UCUGGUUUCAGGAGAACUCUGAU | AUCAGAGUUCUCCUGAAACCAGA | | [687-709] ORF |
| 1095 | CUCUGGUUUCAGGAGAACUCUGA | UCAGAGUUCUCCUGAAACCAGAG | | [686-708] ORF |
| 1096 | CCAUGGUUGCAACUGGCAGUUUG | CAAACUGCCAGUUGCAACCAUGG | Chimp | [202-224] 5′UTR + ORF |
| 1097 | ACCAUGGUUGCAACUGGCAGUUU | AAACUGCCAGUUGCAACCAUGGU | Chimp | [201-223] 5′UTR + ORF |
| 1098 | GACCAUGGUUGCAACUGGCAGUU | AACUGCCAGUUGCAACCAUGGUC | Chimp | [200-222] 5′UTR + ORF |
| 1099 | UGACCAUGGUUGCAACUGGCAGU | ACUGCCAGUUGCAACCAUGGUCA | Chimp | [199-221] 5′UTR + ORF |
| 1100 | UGUGAUCCUGUUACUGAUACUAU | AUAGUAUCAGUAACAGGAUCACA | | [2189-2211] 3′UTR |
| 1101 | AUUAUUUCAUGAUUGGGUAGUAA | UUACUACCCAAUCAUGAAAUAAU | | [805-827] 3′UTR |
| 1102 | GUUUUUAGACAGGAAGGUAGGAU | AUCCUACCUUCCUGUCUAAAAAC | | [1273-1295] 3′UTR |
| 1103 | GGUUUUUAGACAGGAAGGUAGGA | UCCUACCUUCCUGUCUAAAAACC | | [1272-1294] 3′UTR |
| 1104 | GGGUUUUUAGACAGGAAGGUAGG | CCUACCUUCCUGUCUAAAAACCC | | [1271-1293] 3′UTR |
| 1105 | AGGGUUUUUAGACAGGAAGGUAG | CUACCUUCCUGUCUAAAAACCCU | | [1270-1292] 3′UTR |
| 1106 | AGGUUUCCUGCCCUAGCUAUUAG | CUAAUAGCUAGGGCAGGAAACCU | | [2098-2120] 3′UTR |
| 1107 | CAGGUUUCCUGCCCUAGCUAUUA | UAAUAGCUAGGGCAGGAAACCUG | | [2097-2119] 3′UTR |
| 1108 | UCAGGUUUCCUGCCCUAGCUAUU | AAUAGCUAGGGCAGGAAACCUGA | | [2096-2118] 3′UTR |
| 1109 | UUCAGGUUUCCUGCCCUAGCUAU | AUAGCUAGGGCAGGAAACCUGAA | | [2095-2117] 3′UTR |
| 1110 | AUUCAGGUUUCCUGCCCUAGCUA | UAGCUAGGGCAGGAAACCUGAAU | | [2094-2116] 3′UTR |
| 1111 | CAACAAUGUUCAAUUCAGCAAGG | CCUUGCUGAAUUGAACAUUGUUG | | [2033-2055] 3′UTR |
| 1112 | UCAACAAUGUUCAAUUCAGCAAG | CUUGCUGAAUUGAACAUUGUUGA | | [2032-2054] 3′UTR |
| 1113 | CUCAACAAUGUUCAAUUCAGCAA | UUGCUGAAUUGAACAUUGUUGAG | | [2031-2053] 3′UTR |
| 1114 | ACUCAACAAUGUUCAAUUCAGCA | UGCUGAAUUGAACAUUGUUGAGU | | [2030-2052] 3′UTR |
| 1115 | CACUCAACAAUGUUCAAUUCAGC | GCUGAAUUGAACAUUGUUGAGUG | | [2029-2051] 3′UTR |
| 1116 | CCUCUUUUCAGUAUUACAUGUGC | GCACAUGUAAUACUGAAAAGAGG | | [1655-1677] 3′UTR |
| 1117 | UCCUCUUUUCAGUAUUACAUGUG | CACAUGUAAUACUGAAAAGAGGA | | [1654-1676] 3′UTR |
| 1118 | AUCCUCUUUUCAGUAUUACAUGU | ACAUGUAAUACUGAAAAGAGGAU | | [1653-1675] 3′UTR |
| 1119 | UAUCCUCUUUUCAGUAUUACAUG | CAUGUAAUACUGAAAAGAGGAUA | | [1652-1674] 3′UTR |
| 1120 | CUAUCCUCUUUUCAGUAUUACAU | AUGUAAUACUGAAAAGAGGAUAG | | [1651-1673] 3′UTR |
| 1121 | AGUGUUGAAUACUGUCUUUAAAC | GUUUAAAGACAGUAUUCAACACU | | [1496-1518] 3′UTR |
| 1122 | AAGUGUUGAAUACUGUCUUUAAA | UUUAAAGACAGUAUUCAACACUU | | [1495-1517] 3′UTR |
| 1123 | UAAGUGUUGAAUACUGUCUUUAA | UUAAAGACAGUAUUCAACACUUA | | [1494-1516] 3′UTR |
| 1124 | UUAAGUGUUGAAUACUGUCUUUA | UAAAGACAGUAUUCAACACUUAA | | [1493-1515] 3′UTR |
| 1125 | GAACAACAGUGAUUGAAGGGUCC | GGACCCUUCAAUCACUGUUGUUC | | [760-782] ORF |
| 1126 | UCUAUCCUCUUUUCAGUAUUACA | UGUAAUACUGAAAAGAGGAUAGA | | [1650-1672] 3′UTR |
| 1127 | GGAAAUUAGUUCUGAGAUCUAGU | ACUAGAUCUCAGAACUAAUUUCC | | [1605-1627] 3′UTR |
| 1128 | AGGAAAUUAGUUCUGAGAUCUAG | CUAGAUCUCAGAACUAAUUUCCU | | [1604-1626] 3′UTR |
| 1129 | UAGGAAAUUAGUUCUGAGAUCUA | UAGAUCUCAGAACUAAUUUCCUA | | [1603-1625] 3′UTR |
| 1130 | AUAGGAAAUUAGUUCUGAGAUCU | AGAUCUCAGAACUAAUUUCCUAU | | [1602-1624] 3′UTR |
| 1131 | UUGUCCUUUUUCCACUAACAGUU | AACUGUUAGUGGAAAAAGGACAA | | [2441-2463] 3′UTR |
| 1132 | UUUUCUGGCCUUUGGAGAAGUGA | UCACUUCUCCAAAGGCCAGAAAA | | [953-975] 3′UTR |
| 1133 | AUUUUCUGGCCUUUGGAGAAGUG | CACUUCUCCAAAGGCCAGAAAAU | | [952-974] 3′UTR |
| 1134 | GAUUUUCUGGCCUUUGGAGAAGU | ACUUCUCCAAAGGCCAGAAAAUC | | [951-973] 3′UTR |
| 1135 | AGUCCCUCUCUGAUUCACUUAGU | ACUAAGUGAAUCAGAGAGGGACU | | [1625-1647] 3′UTR |
| 1136 | UAGUCCCUCUCUGAUUCACUUAG | CUAAGUGAAUCAGAGAGGGACUA | | [1624-1646] 3′UTR |
| 1137 | CUAGUCCCUCUCUGAUUCACUUA | UAAGUGAAUCAGAGAGGGACUAG | | [1623-1645] 3′UTR |
| 1138 | UCUAGUCCCUCUCUGAUUCACUU | AAGUGAAUCAGAGAGGGACUAGA | | [1622-1644] 3′UTR |
| 1139 | UCUUUAUAGAAUUGGGCCAAGAU | AUCUUGGCCCAAUUCUAUAAAGA | | [2299-2321] 3′UTR |
| 1140 | GUUUCAGGAGAACUCUGAUCCUC | GAGGAUCAGAGUUCUCCUGAAAC | | [691-713] ORF |
| 1141 | CCUAGCUAUUAGCUCCACUUCAC | GUGAAGUGGAGCUAAUAGCUAGG | | [2109-2131] 3′UTR |
| 1142 | ACUCAAAUUUGAAGGGUUUUUAG | CUAAAAACCCUUCAAAUUUGAGU | | [1258-1280] 3′UTR |
| 1143 | CUAACAGGCUGAUUUUCUGGCCU | AGGCCAGAAAAUCAGCCUGUUAG | | [941-963] 3′UTR |
| 1144 | GCUAACAGGCUGAUUUUCUGGCC | GGCCAGAAAAUCAGCCUGUUAGC | | [940-962] 3′UTR |
| 1145 | AGCUAACAGGCUGAUUUUCUGGC | GCCAGAAAAUCAGCCUGUUAGCU | | [939-961] 3′UTR |
| 1146 | CAGCUAACAGGCUGAUUUUCUGG | CCAGAAAAUCAGCCUGUUAGCUG | | [938-960] 3′UTR |
| 1147 | GCAGCUAACAGGCUGAUUUUCUG | CAGAAAAUCAGCCUGUUAGCUGC | | [937-959] 3′UTR |
| 1148 | CAAUGUUCAAUUCAGCAAGGCUU | AAGCCUUGCUGAAUUGAACAUUG | | [2036-2058] 3′UTR |
| 1149 | ACAAUGUUCAAUUCAGCAAGGCU | AGCCUUGCUGAAUUGAACAUUGU | | [2035-2057] 3′UTR |
| 1150 | AACAAUGUUCAAUUCAGCAAGGC | GCCUUGCUGAAUUGAACAUUGUU | | [2034-2056] 3′UTR |
| 1151 | UGGUGUUACUGAAAAACAGGUGU | ACACCUGUUUUUCAGUAACACCA | | [2169-2191] 3′UTR |
| 1152 | CUGGUGUUACUGAAAAACAGGUG | CACCUGUUUUUCAGUAACACCAG | | [2168-2190] 3′UTR |
| 1153 | CCUGGUGUUACUGAAAAACAGGU | ACCUGUUUUUCAGUAACACCAGG | | [2167-2189] 3′UTR |
| 1154 | GUUCCUGAACCCAACCUCAACGA | UCGUUGAGGUUGGGUUCAGGAAC | Chimp | [318-340] ORF |
| 1155 | UGUUCCUGAACCCAACCUCAACG | CGUUGAGGUUGGGUUCAGGAACA | Chimp | [317-339] ORF |
| 1156 | UUGUUCCUGAACCCAACCUCAAC | GUUGAGGUUGGGUUCAGGAACAA | Chimp | [316-338] ORF |
| 1157 | GUUGUUCCUGAACCCAACCUCAA | UUGAGGUUGGGUUCAGGAACAAC | Chimp | [315-337] ORF |
| 1158 | UGUUGUUCCUGAACCCAACCUCA | UGAGGUUGGGUUCAGGAACAACA | Chimp | [314-336] ORF |
| 1159 | UUUCAGGAGAACUCUGAUCCUCA | UGAGGAUCAGAGUUCUCCUGAAA | | [692-714] ORF |
| 1160 | CAACUUGCCAGAAUUUGGUUAAA | UUUAACCAAAUUCUGGCAAGUUG | Chimp | [358-380] ORF |
| 1161 | UGCAGCUAACAGGCUGAUUUUCU | AGAAAAUCAGCCUGUUAGCUGCA | | [936-958] 3′UTR |
| 1162 | CUGCAGCUAACAGGCUGAUUUUC | GAAAAUCAGCCUGUUAGCUGCAG | | [935-957] 3′UTR |
| 1163 | ACUGCAGCUAACAGGCUGAUUUU | AAAAUCAGCCUGUUAGCUGCAGU | | [934-956] 3′UTR |
| 1164 | CCCAAAUGUAGUCUCUUUUCUUU | AAAGAAAAGAGACUACAUUUGGG | | [890-912] 3′UTR |
| 1165 | CCCCAAAUGUAGUCUCUUUUCUU | AAGAAAAGAGACUACAUUUGGGG | | [889-911] 3′UTR |
| 1166 | ACCCCAAAUGUAGUCUCUUUUCU | AGAAAAGAGACUACAUUUGGGGU | | [888-910] 3′UTR |
| 1167 | AACCCCAAAUGUAGUCUCUUUUC | GAAAAGAGACUACAUUUGGGGUU | | [887-909] 3′UTR |
| 1168 | AAACCCCAAAUGUAGUCUCUUUU | AAAAGAGACUACAUUUGGGGUUU | | [886-908] 3′UTR |
| 1169 | ACCAUGCAUGCACCCAGAUUUUU | AAAAAUCUGGGUGCAUGCAUGGU | | [1892-1914] 3′UTR |
| 1170 | GGAACUGCUUCACUGUUUCUUGG | CCAAGAAACAGUGAAGCAGUUCC | | [1363-1385] 3′UTR |
| 1171 | UGGAACUGCUUCACUGUUUCUUG | CAAGAAACAGUGAAGCAGUUCCA | | [1362-1384] 3′UTR |
| 1172 | AUGGAACUGCUUCACUGUUUCUU | AAGAAACAGUGAAGCAGUUCCAU | | [1361-1383] 3′UTR |
| 1173 | AAUGGAACUGCUUCACUGUUUCU | AGAAACAGUGAAGCAGUUCCAUU | | [1360-1382] 3′UTR |
| 1174 | UAAUGGAACUGCUUCACUGUUUC | GAAACAGUGAAGCAGUUCCAUUA | | [1359-1381] 3′UTR |
| 1175 | CCAAAGGUUCACUGUGUUUCUGC | GCAGAAACACAGUGAACCUUUGG | | [2357-2379] 3′UTR |
| 1176 | UCCAAAGGUUCACUGUGUUUCUG | CAGAAACACAGUGAACCUUUGGA | | [2356-2378] 3′UTR |
| 1177 | CUCCAAAGGUUCACUGUGUUUCU | AGAAACACAGUGAACCUUUGGAG | | [2355-2377] 3′UTR |
| 1178 | GCUCCAAAGGUUCACUGUGUUUC | GAAACACAGUGAACCUUUGGAGC | | [2354-2376] 3′UTR |
| 1179 | AGCUCCAAAGGUUCACUGUGUUU | AAACACAGUGAACCUUUGGAGCU | | [2353-2375] 3′UTR |
| 1180 | GAACCAUUUCACCAUGGCAGUGU | ACACUGCCAUGGUGAAAUGGUUC | | [1690-1712] 3′UTR |
| 1181 | UGAACCAUUUCACCAUGGCAGUG | CACUGCCAUGGUGAAAUGGUUCA | | [1689-1711] 3′UTR |
| 1182 | AUGAACCAUUUCACCAUGGCAGU | ACUGCCAUGGUGAAAUGGUUCAU | | [1688-1710] 3′UTR |
| 1183 | GAUGAACCAUUUCACCAUGGCAG | CUGCCAUGGUGAAAUGGUUCAUC | | [1687-1709] 3′UTR |
| 1184 | ACUAAACUUGGUUGCUCAAAGGU | ACCUUUGAGCAACCAAGUUUAGU | Chimp | [414-436] ORF |
| 1185 | AACUAAACUUGGUUGCUCAAAGG | CCUUUGAGCAACCAAGUUUAGUU | Chimp | [413-435] ORF |
| 1186 | AAACUAAACUUGGUUGCUCAAAG | CUUUGAGCAACCAAGUUUAGUUU | Chimp | [412-434] ORF |
| 1187 | CAAACUAAACUUGGUUGCUCAAA | UUUGAGCAACCAAGUUUAGUUUG | Chimp | [411-433] ORF |
| 1188 | GCAAACUAAACUUGGUUGCUCAA | UUGAGCAACCAAGUUUAGUUUGC | Chimp | [410-432] ORF |
| 1189 | AUUUUCUGCAUAGAUCCCAUUUU | AAAAUGGGAUCUAUGCAGAAAAU | | [991-1013] 3′UTR |
| 1190 | GAUUUUCUGCAUAGAUCCCAUUU | AAAUGGGAUCUAUGCAGAAAAUC | | [990-1012] 3′UTR |
| 1191 | AGAUUUUCUGCAUAGAUCCCAUU | AAUGGGAUCUAUGCAGAAAAUCU | | [989-1011] 3′UTR |
| 1192 | UAGAUUUUCUGCAUAGAUCCCAU | AUGGGAUCUAUGCAGAAAAUCUA | | [988-1010] 3′UTR |
| 1193 | AUUUACGAAGUCUGCAUUGGCUA | UAGCCAAUGCAGACUUCGUAAAU | | [1817-1839] 3′UTR |
| 1194 | GAUCAUUAUCUCUUUCCUUUUUU | AAAAAAGGAAAGAGAUAAUGAUC | | [1982-2004] 3′UTR |
| 1195 | AGAUCAUUAUCUCUUUCCUUUUU | AAAAAGGAAAGAGAUAAUGAUCU | | [1981-2003] 3′UTR |
| 1196 | UAGAUCAUUAUCUCUUUCCUUUU | AAAAGGAAAGAGAUAAUGAUCUA | | [1980-2002] 3′UTR |
| 1197 | GUAGAUCAUUAUCUCUUUCCUUU | AAAGGAAAGAGAUAAUGAUCUAC | | [1979-2001] 3′UTR |
| 1198 | AGUAGAUCAUUAUCUCUUUCCUU | AAGGAAAGAGAUAAUGAUCUACU | | [1978-2000] 3′UTR |
| 1199 | GCAUUGGCUAUGGAGAUAUGGUU | AACCAUAUCUCCAUAGCCAAUGC | | [1830-1852] 3′UTR |
| 1200 | GGUAGUAGCUGUAUACUACCACU | AGUGGUAGUAUACAGCUACUACC | | [1773-1795] 3′UTR |
| 1201 | CCAAUUGUCAAGGGUAGUAGCUG | CAGCUACUACCCUUGACAAUUGG | | [1761-1783] 3′UTR |
| 1202 | CCCAAUUGUCAAGGGUAGUAGCU | AGCUACUACCCUUGACAAUUGGG | | [1760-1782] 3′UTR |
| 1203 | CCCCAAUUGUCAAGGGUAGUAGC | GCUACUACCCUUGACAAUUGGGG | | [1759-1781] 3′UTR |
| 1204 | ACCCCAAUUGUCAAGGGUAGUAG | CUACUACCCUUGACAAUUGGGGU | | [1758-1780] 3′UTR |
| 1205 | AACCCCAAUUGUCAAGGGUAGUA | UACUACCCUUGACAAUUGGGGUU | | [1757-1779] 3′UTR |
| 1206 | CUUAGUAAUCUAUCCUCUUUUCA | UGAAAAGAGGAUAGAUUACUAAG | | [1642-1664] 3′UTR |
| 1207 | ACUUAGUAAUCUAUCCUCUUUUC | GAAAAGAGGAUAGAUUACUAAGU | | [1641-1663] 3′UTR |
| 1208 | CACUUAGUAAUCUAUCCUCUUUU | AAAAGAGGAUAGAUUACUAAGUG | | [1640-1662] 3′UTR |
| 1209 | UCACUUAGUAAUCUAUCCUCUUU | AAAGAGGAUAGAUUACUAAGUGA | | [1639-1661] 3′UTR |
| 1210 | UUCACUUAGUAAUCUAUCCUCUU | AAGAGGAUAGAUUACUAAGUGAA | | [1638-1660] 3′UTR |
| 1211 | CUGGAGUUGUCACCACUGACUGG | CCAGUCAGUGGUGACAACUCCAG | | [2387-2409] 3′UTR |
| 1212 | CCUGGAGUUGUCACCACUGACUG | CAGUCAGUGGUGACAACUCCAGG | | [2386-2408] 3′UTR |
| 1213 | UCCUGGAGUUGUCACCACUGACU | AGUCAGUGGUGACAACUCCAGGA | | [2385-2407] 3′UTR |
| 1214 | GUCCUGGAGUUGUCACCACUGAC | GUCAGUGGUGACAACUCCAGGAC | | [2384-2406] 3′UTR |
| 1215 | UGUCCUGGAGUUGUCACCACUGA | UCAGUGGUGACAACUCCAGGACA | | [2383-2405] 3′UTR |
| 1216 | CAGUUUGAGCAGCAAGAACCCGG | CCGGGUUCUUGCUGCUCAAACUG | Chimp | [218-240] ORF |
| 1217 | CUACUGGGAUUAUGUUGUUCCUG | CAGGAACAACAUAAUCCCAGUAG | Chimp | [302-324] ORF |
| 1218 | ACUACUGGGAUUAUGUUGUUCCU | AGGAACAACAUAAUCCCAGUAGU | Chimp | [301-323] ORF |
| 1219 | GACUACUGGGAUUAUGUUGUUCC | GGAACAACAUAAUCCCAGUAGUC | Chimp | [300-322] ORF |
| 1220 | UGACUACUGGGAUUAUGUUGUUC | GAACAACAUAAUCCCAGUAGUCA | Chimp | [299-321] ORF |
| 1221 | UUGACUACUGGGAUUAUGUUGUU | AACAACAUAAUCCCAGUAGUCAA | Chimp | [298-320] ORF |
| 1222 | UAGGGACAGAUGUAUUCAUCCUG | CAGGAUGAAUACAUCUGUCCCUA | | [2148-2170] 3′UTR |
| 1223 | GUAGGGACAGAUGUAUUCAUCCU | AGGAUGAAUACAUCUGUCCCUAC | | [2147-2169] 3′UTR |
| 1224 | CGUAGGGACAGAUGUAUUCAUCC | GGAUGAAUACAUCUGUCCCUACG | | [2146-2168] 3′UTR |
| 1225 | CAAUCUUUAUAGAAUUGGGCCAA | UUGGCCCAAUUCUAUAAAGAUUG | | [2296-2318] 3′UTR |
| 1226 | CCAAUCUUUAUAGAAUUGGGCCA | UGGCCCAAUUCUAUAAAGAUUGG | | [2295-2317] 3′UTR |
| 1227 | GCCAAUCUUUAUAGAAUUGGGCC | GGCCCAAUUCUAUAAAGAUUGGC | | [2294-2316] 3′UTR |
| 1228 | AGCCAAUCUUUAUAGAAUUGGGC | GCCCAAUUCUAUAAAGAUUGGCU | | [2293-2315] 3′UTR |
| 1229 | AAGCCAAUCUUUAUAGAAUUGGG | CCCAAUUCUAUAAAGAUUGGCUU | | [2292-2314] 3′UTR |
| 1230 | GUUGUCCUUUUUCCACUAACAGU | ACUGUUAGUGGAAAAAGGACAAC | | [2440-2462] 3′UTR |
| 1231 | GUCCUAAAAAGGGAAAAUAUAUA | UAUAUAUUUUCCCUUUUUAGGAC | | [779-801] ORF + 3′UTR |
| 1232 | AUUUAGCCUAUCAAAACUUCCAA | UUGGAAGUUUUGAUAGGCUAAAU | | [1213-1235] 3′UTR |
| 1233 | CUAAACUCUUCAAAUGCUUGGAA | UUCCAAGCAUUUGAAGAGUUUAG | | [2259-2281] 3′UTR |
| 1234 | ACUAAACUCUUCAAAUGCUUGGA | UCCAAGCAUUUGAAGAGUUUAGU | | [2258-2280] 3′UTR |
| 1235 | AACUAAACUCUUCAAAUGCUUGG | CCAAGCAUUUGAAGAGUUUAGUU | | [2257-2279] 3′UTR |
| 1236 | AAACUAAACUCUUCAAAUGCUUG | CAAGCAUUUGAAGAGUUUAGUUU | | [2256-2278] 3′UTR |
| 1237 | CAAACUAAACUCUUCAAAUGCUU | AAGCAUUUGAAGAGUUUAGUUUG | | [2255-2277] 3′UTR |
| 1238 | UGCGAGGUUGUGUUAUGCACGUG | CACGUGCAUAACACAACCUCGCA | | [511-533] ORF |
| 1239 | UUGCGAGGUUGUGUUAUGCACGU | ACGUGCAUAACACAACCUCGCAA | | [510-532] ORF |
| 1240 | UCAACUUGCCAGAAUUUGGUUAA | UUAACCAAAUUCUGGCAAGUUGA | Chimp | [357-379] ORF |
| 1241 | CAAAAGCUUGUGGUGCCAUUUCA | UGAAAUGGCACCACAAGCUUUUG | | [1419-1441] 3′UTR |
| 1242 | ACAAAAGCUUGUGGUGCCAUUUC | GAAAUGGCACCACAAGCUUUUGU | | [1418-1440] 3′UTR |
| 1243 | AACAAAAGCUUGUGGUGCCAUUU | AAAUGGCACCACAAGCUUUUGUU | | [1417-1439] 3′UTR |
| 1244 | CAACAAAAGCUUGUGGUGCCAUU | AAUGGCACCACAAGCUUUUGUUG | | [1416-1438] 3′UTR |
| 1245 | GCAAGGCUUUCAUAUCCUUGCUG | CAGCAAGGAUAUGAAAGCCUUGC | | [2050-2072] 3′UTR |
| 1246 | AGCAAGGCUUUCAUAUCCUUGCU | AGCAAGGAUAUGAAAGCCUUGCU | | [2049-2071] 3′UTR |
| 1247 | CAGCAAGGCUUUCAUAUCCUUGC | GCAAGGAUAUGAAAGCCUUGCUG | | [2048-2070] 3′UTR |
| 1248 | UCAGCAAGGCUUUCAUAUCCUUG | CAAGGAUAUGAAAGCCUUGCUGA | | [2047-2069] 3′UTR |
| 1249 | UUCAGCAAGGCUUUCAUAUCCUU | AAGGAUAUGAAAGCCUUGCUGAA | | [2046-2068] 3′UTR |
| 1250 | AAGAUACUACAAAGCCAAUCUUU | AAAGAUUGGCUUUGUAGUAUCUU | | [2281-2303] 3′UTR |
| 1251 | UCAGCUCAGGAUUUCGACUUGUU | AACAAGUCGAAAUCCUGAGCUGA | | [712-734] ORF |
| 1252 | GCAGUGUUAUCUCAUCUCUGGGC | GCCCAGAGAUGAGAUAACACUGC | | [1706-1728] 3′UTR |
| 1253 | GGCAGUGUUAUCUCAUCUCUGGG | CCCAGAGAUGAGAUAACACUGCC | | [1705-1727] 3′UTR |
| 1254 | UGGCAGUGUUAUCUCAUCUCUGG | CCAGAGAUGAGAUAACACUGCCA | | [1704-1726] 3′UTR |
| 1255 | AUGGCAGUGUUAUCUCAUCUCUG | CAGAGAUGAGAUAACACUGCCAU | | [1703-1725] 3′UTR |
| 1256 | CAUGGCAGUGUUAUCUCAUCUCU | AGAGAUGAGAUAACACUGCCAUG | | [1702-1724] 3′UTR |
| 1257 | AUCUUUAUAGAAUUGGGCCAAGA | UCUUGGCCCAAUUCUAUAAAGAU | | [2298-2320] 3′UTR |
| 1258 | AAUCUUUAUAGAAUUGGGCCAAG | CUUGGCCCAAUUCUAUAAAGAUU | | [2297-2319] 3′UTR |
| 1259 | CCCAUUUUUGUACAGAAUUGAAU | AUUCAAUUCUGUACAAAAAUGGG | | [1006-1028] 3′UTR |
| 1260 | UCCCAUUUUUGUACAGAAUUGAA | UUCAAUUCUGUACAAAAAUGGGA | | [1005-1027] 3′UTR |
| 1261 | AUCCCAUUUUUGUACAGAAUUGA | UCAAUUCUGUACAAAAAUGGGAU | | [1004-1026] 3′UTR |
| 1262 | GAUCCCAUUUUUGUACAGAAUUG | CAAUUCUGUACAAAAAUGGGAUC | | [1003-1025] 3′UTR |
| 1263 | AGAUCCCAUUUUUGUACAGAAUU | AAUUCUGUACAAAAAUGGGAUCU | | [1002-1024] 3′UTR |
| 1264 | GUGUGUAGUUGAUUACUCUUCCA | UGGAAGAGUAAUCAACUACACAC | | [1552-1574] 3′UTR |
| 1265 | UGUGUGUAGUUGAUUACUCUUCC | GGAAGAGUAAUCAACUACACACA | | [1551-1573] 3′UTR |
| 1266 | UUGUGUGUAGUUGAUUACUCUUC | GAAGAGUAAUCAACUACACACAA | | [1550-1572] 3′UTR |
| 1267 | UUUGUGUGUAGUUGAUUACUCUU | AAGAGUAAUCAACUACACACAAA | | [1549-1571] 3′UTR |
| 1268 | UUUUGUGUGUAGUUGAUUACUCU | AGAGUAAUCAACUACACACAAAA | | [1548-1570] 3′UTR |
| 1269 | GUAAAUGAGAAAUAUUACGGCAA | UUGCCGUAAUAUUUCUCAUUUAC | | [1336-1358] 3′UTR |
| 1270 | AUGCACCCAGAUUUUUUCCACCU | AGGUGGAAAAAAUCUGGGUGCAU | | [1899-1921] 3′UTR |
| 1271 | CAUGCACCCAGAUUUUUUCCACC | GGUGGAAAAAAUCUGGGUGCAUG | | [1898-1920] 3′UTR |
| 1272 | UAGAUCCCAUUUUUGUACAGAAU | AUUCUGUACAAAAAUGGGAUCUA | | [1001-1023] 3′UTR |
| 1273 | AUAGAUCCCAUUUUUGUACAGAA | UUCUGUACAAAAAUGGGAUCUAU | | [1000-1022] 3′UTR |
| 1274 | CAGAAUUGCUGGACUGUGGCUAU | AUAGCCACAGUCCAGCAAUUCUG | Chimp | [250-272] ORF |
| 1275 | UCAGAAUUGCUGGACUGUGGCUA | UAGCCACAGUCCAGCAAUUCUGA | Chimp | [249-271] ORF |
| 1276 | UUCAGAAUUGCUGGACUGUGGCU | AGCCACAGUCCAGCAAUUCUGAA | Chimp | [248-270] ORF |
| 1277 | UUUCAGAAUUGCUGGACUGUGGC | GCCACAGUCCAGCAAUUCUGAAA | Chimp | [247-269] ORF |
| 1278 | AUUUCAGAAUUGCUGGACUGUGG | CCACAGUCCAGCAAUUCUGAAAU | Chimp | [246-268] ORF |
| 1279 | UUUGACUACUGGGAUUAUGUUGU | ACAACAUAAUCCCAGUAGUCAAA | Chimp | [297-319] ORF |
| 1280 | UUUUGACUACUGGGAUUAUGUUG | CAACAUAAUCCCAGUAGUCAAAA | Chimp | [296-318] ORF |
| 1281 | AUUUUGACUACUGGGAUUAUGUU | AACAUAAUCCCAGUAGUCAAAAU | Chimp | [295-317] ORF |
| 1282 | GAGAAUUGCUCAAGAUGUCCUGC | GCAGGACAUCUUGAGCAAUUCUC | Chimp, Ms | [461-483] ORF |
| 1283 | AGAGAAUUGCUCAAGAUGUCCUG | CAGGACAUCUUGAGCAAUUCUCU | Chimp, Ms | [460-482] ORF |
| 1284 | CAGAGAAUUGCUCAAGAUGUCCU | AGGACAUCUUGAGCAAUUCUCUG | Chimp, Ms | [459-481] ORF |
| 1285 | UGUAGAACUGUUGUCCUUUUUCC | GGAAAAAGGACAACAGUUCUACA | | [2431-2453] 3′UTR |
| 1286 | AUGUAGAACUGUUGUCCUUUUUC | GAAAAAGGACAACAGUUCUACAU | | [2430-2452] 3′UTR |
| 1287 | GAUGUAGAACUGUUGUCCUUUUU | AAAAAGGACAACAGUUCUACAUC | | [2429-2451] 3′UTR |
| 1288 | CGAUGUAGAACUGUUGUCCUUUU | AAAAGGACAACAGUUCUACAUCG | | [2428-2450] 3′UTR |
| 1289 | CCAUUUUUGUACAGAAUUGAAUG | CAUUCAAUUCUGUACAAAAAUGG | | [1007-1029] 3′UTR |
| 1290 | CUUAAUCUCAGAUGAACCAUUUC | GAAAUGGUUCAUCUGAGAUUAAG | | [1677-1699] 3′UTR |
| 1291 | GCUUAAUCUCAGAUGAACCAUUU | AAAUGGUUCAUCUGAGAUUAAGC | | [1676-1698] 3′UTR |
| 1292 | UGCUUAAUCUCAGAUGAACCAUU | AAUGGUUCAUCUGAGAUUAAGCA | | [1675-1697] 3′UTR |
| 1293 | GAAUUUGGUUAAAAUGCUGGAGA | UCUCCAGCAUUUUAACCAAAUUC | Chimp | [368-390] ORF |
| 1294 | AGAAUUUGGUUAAAAUGCUGGAG | CUCCAGCAUUUUAACCAAAUUCU | Chimp | [367-389] ORF |
| 1295 | CAGAAUUUGGUUAAAAUGCUGGA | UCCAGCAUUUUAACCAAAUUCUG | Chimp | [366-388] ORF |
| 1296 | CCAGAAUUUGGUUAAAAUGCUGG | CCAGCAUUUUAACCAAAUUCUGG | Chimp | [365-387] ORF |
| 1297 | UUUUUAGACAGGAAGGUAGGAUU | AAUCCUACCUUCCUGUCUAAAAA | | [1274-1296] 3′UTR |
| 1298 | UUGAAGUAUCUCUCCUUAACCCC | GGGGUUAAGGAGAGAUACUUCAA | | [1740-1762] 3′UTR |
| 1299 | AUUGAAGUAUCUCUCCUUAACCC | GGGUUAAGGAGAGAUACUUCAAU | | [1739-1761] 3′UTR |
| 1300 | AAUUGAAGUAUCUCUCCUUAACC | GGUUAAGGAGAGAUACUUCAAUU | | [1738-1760] 3′UTR |
| 1301 | GAAUUGAAGUAUCUCUCCUUAAC | GUUAAGGAGAGAUACUUCAAUUC | | [1737-1759] 3′UTR |
| 1302 | GGAAUUGAAGUAUCUCUCCUUAA | UUAAGGAGAGAUACUUCAAUUCC | | [1736-1758] 3′UTR |
| 1303 | CUUUGACUCUCUUGCCUGUUAUG | CAUAACAGGCAAGAGAGUCAAAG | | [2466-2488] 3′UTR |
| 1304 | UCUUUGACUCUCUUGCCUGUUAU | AUAACAGGCAAGAGAGUCAAAGA | | [2465-2487] 3′UTR |
| 1305 | AUCUUUGACUCUCUUGCCUGUUA | UAACAGGCAAGAGAGUCAAAGAU | | [2464-2486] 3′UTR |
| 1306 | UAUCUUUGACUCUCUUGCCUGUU | AACAGGCAAGAGAGUCAAAGAUA | | [2463-2485] 3′UTR |
| 1307 | UUAUCUUUGACUCUCUUGCCUGU | ACAGGCAAGAGAGUCAAAGAUAA | | [2462-2484] 3′UTR |
| 1308 | UGUGGCUAUCACCCAGAGAGCCU | AGGCUCUCUGGGUGAUAGCCACA | Chimp | [264-286] ORF |
| 1309 | CUGUGGCUAUCACCCAGAGAGCC | GGCUCUCUGGGUGAUAGCCACAG | Chimp | [263-285] ORF |
| 1310 | ACUGUGGCUAUCACCCAGAGAGC | GCUCUCUGGGUGAUAGCCACAGU | Chimp | [262-284] ORF |
| 1311 | GACUGUGGCUAUCACCCAGAGAG | CUCUCUGGGUGAUAGCCACAGUC | Chimp | [261-283] ORF |
| 1312 | GGACUGUGGCUAUCACCCAGAGA | UCUCUGGGUGAUAGCCACAGUCC | Chimp | [260-282] ORF |
| 1313 | AUAAAGGCCUUAUUUUUUGUCUU | AAGACAAAAAAUAAGGCCUUUAU | | [1945-1967] 3′UTR |
| 1314 | CAGUGUUAUCUCAUCUCUGGGCU | AGCCCAGAGAUGAGAUAACACUG | | [1707-1729] 3′UTR |
| 1315 | UGCAACUGGCAGUUUGAGCAGCA | UGCUGCUCAAACUGCCAGUUGCA | Dog, Chimp | [209-231] ORF |
| 1316 | UUGCAACUGGCAGUUUGAGCAGC | GCUGCUCAAACUGCCAGUUGCAA | Dog, Chimp | [208-230] ORF |
| 1317 | GAUUAUUUCAUGAUUGGGUAGUA | UACUACCCAAUCAUGAAAUAAUC | | [804-826] 3′UTR |
| 1318 | AGAUGCCUUUAUAAGCUCAGUUU | AAACUGAGCUUAUAAAGGCAUCU | | [1461-1483] 3′UTR |
| 1319 | UAGAUGCCUUUAUAAGCUCAGUU | AACUGAGCUUAUAAAGGCAUCUA | | [1460-1482] 3′UTR |
| 1320 | UUAGAUGCCUUUAUAAGCUCAGU | ACUGAGCUUAUAAAGGCAUCUAA | | [1459-1481] 3′UTR |
| 1321 | UUUAGAUGCCUUUAUAAGCUCAG | CUGAGCUUAUAAAGGCAUCUAAA | | [1458-1480] 3′UTR |
| 1322 | UUUUAGAUGCCUUUAUAAGCUCA | UGAGCUUAUAAAGGCAUCUAAAA | | [1457-1479] 3′UTR |
| 1323 | GUUAAGCUCCAAAGGUUCACUGU | ACAGUGAACCUUUGGAGCUUAAC | | [2349-2371] 3′UTR |
| 1324 | UGUUAAGCUCCAAAGGUUCACUG | CAGUGAACCUUUGGAGCUUAACA | | [2348-2370] 3′UTR |
| 1325 | UUGUUAAGCUCCAAAGGUUCACU | AGUGAACCUUUGGAGCUUAACAA | | [2347-2369] 3′UTR |
| 1326 | AUUGUUAAGCUCCAAAGGUUCAC | GUGAACCUUUGGAGCUUAACAAU | | [2346-2368] 3′UTR |
| 1327 | UAUUGUUAAGCUCCAAAGGUUCA | UGAACCUUUGGAGCUUAACAAUA | | [2345-2367] 3′UTR |

The application's sequence listing, which the Patent Office published only in electronic form, follows.

SEQUENCE LISTING (6927 sequences)

SEQ ID NO: 1 - RNA, 2607 nt, Homo sapiens
agccggcgcaggguggccggggaggggugagcagggugccgcuggcugcuggggucugcaggucaccgaguccccaggagaggggacuccuaagaagccaccugccuguguuuacccggcagcgagcgcgcaggcccccgcgaacuccuggcagcgcucaggaaaggccguugcgccucgcgaaggaaacagagccguugaccaugguugcaacuggcaguuugagcagcaagaacccggccagcauuucagaauugcuggacuguggcuaucacccagagagccugcuaagugauuuugacuacugggauuauguuguuccugaacccaaccucaacgagguaauauuugaggaaucaacuugccagaauuugguuaaaaugcuggagaacugucuguccaaaucaaagcaaacuaaacuugguugcucaaagguccuugucccugagaaacugacccagagaauugcucaagauguccugcggcuuuccucaacggagcccugcggcuugcgagguuguguuaugcacgugaacuuggaaauugaaaauguauguaaaaagcuggauaggauugugugugauucuagcgucguaccuacuuuugagcuuacacuuguguuuaagcaggagaacugcucauggacuagcuucagggacuuuuucuuuaguagaggucgcuucuccucugguuucaggagaacucugauccucagcucaggauuucgacuuguuaagaaaaaacuuuacucacugauuggaacaacagugauugaaggguccuaaaaagggaaaauauauaaagauuauuucaugauuggguaguaaaacuauucagcuagucagcuaaagucauuuguaguuugccccaccugcccuaaauaagaaaccccaaauguagucucuuuucuuucuguguuucacauucauagcaacugcagcuaacaggcugauuuucuggccuuuggagaagugauucaaaauaguguagauuuucugcauagaucccauuuuuguacagaauugaaugggauggaauagguaagcaaaaguagaagcccauuugaguuuuacauuugauuccacaauuugguuucagguaggcuugguaauagacuauauaaaccagauuugccuauuuugauuuucauauggcuuuuuuuucucuaaguuuucagaggauuuuuuaaaucacagaaucauacuaaaugauauuuagccuaucaaaacuuccaaaagcccacaccaccaguuccugacucaaauuugaaggguuuuuagacaggaagguaggauuaaguaggugaguuuaauuaaagcuuaacccuagguaagaguaaaugagaaauauuacggcaauaauggaacugcuucacuguuucuuggugacuuccucacucuaauguuuuaaagaggcaacaaaagcuuguggugccauuucaguaaccacgguguuguuuuagaugccuuuauaagcucaguuuccccuguucuuaaguguugaauacugucuuuaaacuagaaaaaugcaaaauauugaacugauauuuuuguguguaguugauuacucuuccauugagugaaugaugaauaccugugaggauaggaaauuaguucugagaucuagucccucucugauucacuuaguaaucuauccucuuuucaguauuacaugugcuuaaucucagaugaaccauuucaccauggcaguguuaucucaucucugggcuuuucugggaauugaaguaucucuccuuaaccccaauugucaaggguaguagcuguauacuaccacuuugaauuauugaaacgggucaauuuacgaagucugcauuggcuauggagauaugguuuauaguacagccuagagaaugaaacucaccguccagauaaccaugcaugcacccagauuuuuuccaccuuggauaccugucacuagggaauaauaaaggccuuauuuuuugucuuauuccaacuaaguagaucauuaucucuuuccuuuuuuauguuaaugagagaauuuagccuccacucaacaauguucaauucagcaaggcuuucauauccuugcugugggucguggauaaggagcuuauucagguuuccugcccuagcuauuagcuccacuucacaugcuggagaccggcguagggacagauguauucauccugguguuacugaaaaacaggugugauccuguuacugauacuauaagugaccuaaaaugucacuguucaaauuagccaguguucuaacaaacuaaacucuucaaaugcuuggaaagauacuacaaagccaaucuuuauagaauugggccaagauaaaucaauguuguuuugcaugucuauuguuaagcuccaaagguucacuguguuucugccgcuguccuggaguugucaccacugacugggcaaggcuucuugggcaucgauguagaacuguuguccuuuuuccacuaacaguuaucuuugacucucuugccuguuaugcuuacaaaauggugauggcuuauggaaggcuguuaaauuaauauuccuguuaaaggaaauuaaaguuugucuauuuuugacaauaaaacauuauauauuuuuaaaaaaaaaaaaaaaaa

SEQ ID NO: 2 - RNA, 19 nt, artificial
  RNA Oligomer
gccaguguucuaacaaacu

SEQ ID NO: 3 - RNA, 19 nt, artificial
  RNA Oligomer
uagccaguguucuaacaaa

SEQ ID NO: 4 - RNA, 19 nt, artificial
  RNA Oligomer
gugacuuccucacucuaau

SEQ ID NO: 5 - RNA, 19 nt, artificial
  RNA Oligomer
agccaguguucuaacaaac

SEQ ID NO: 6 - RNA, 19 nt, artificial
  RNA Oligomer
gagugaaugaugaauaccu

SEQ ID NO: 7 - RNA, 19 nt, artificial
  RNA Oligomer
gacuuccucacucuaaugu

SEQ ID NO: 8 - RNA, 19 nt, artificial
  RNA Oligomer
guucuaacaaacuaaacuc

SEQ ID NO: 9 - RNA, 19 nt, artificial
  RNA Oligomer
gaaugaugaauaccuguga

SEQ ID NO: 10 - RNA, 19 nt, artificial
  RNA Oligomer
uccucacucuaauguuuua

SEQ ID NO: 11 - RNA, 19 nt, artificial
  RNA Oligomer
gccagaauuugguuaaaau

SEQ ID NO: 12 - RNA, 19 nt, artificial
  RNA Oligomer
acgggucaauuuacgaagu

SEQ ID NO: 13 - RNA, 19 nt, artificial
  RNA Oligomer
uccauugagugaaugauga

SEQ ID NO: 14 - RNA, 19 nt, artificial
  RNA Oligomer
uuccucacucuaauguuuu

SEQ ID NO: 15 - RNA, 19 nt, artificial
  RNA Oligomer
gcacccagauuuuuuccac

SEQ ID NO: 16 - RNA, 19 nt, artificial
  RNA Oligomer
guggugccauuucaguaac

SEQ ID NO: 17 - RNA, 19 nt, artificial
  RNA Oligomer
ccucacucuaauguuuuaa

SEQ ID NO: 18 - RNA, 19 nt, artificial
  RNA Oligomer
cuuccucacucuaauguuu

SEQ ID NO: 19 - RNA, 19 nt, artificial
  RNA Oligomer
ggcuuuuuuuucucuaagu

SEQ ID NO: 20 - RNA, 19 nt, artificial
  RNA Oligomer
ucccauuuuuguacagaau

SEQ ID NO: 21 - RNA, 19 nt, artificial
  RNA Oligomer
gagaagugauucaaaauag

SEQ ID NO: 22 - RNA, 19 nt, artificial
  RNA Oligomer
ggagaagugauucaaaaua

SEQ ID NO: 23 - RNA, 19 nt, artificial
  RNA Oligomer
gucagcuaaagucauuugu

SEQ ID NO: 24 - RNA, 19 nt, artificial
  RNA Oligomer
ccggccagcauuucagaau

SEQ ID NO: 25 - RNA, 19 nt, artificial
  RNA Oligomer
augcuggagaacugucugu

SEQ ID NO: 26 - RNA, 19 nt, artificial
  RNA Oligomer
aaaugcuggagaacugucu

SEQ ID NO: 27 - RNA, 19 nt, artificial
  RNA Oligomer
ugguuaaaaugcuggagaa

SEQ ID NO: 28 - RNA, 19 nt, artificial
  RNA Oligomer
uugguuaaaaugcuggaga

SEQ ID NO: 29 - RNA, 19 nt, artificial
  RNA Oligomer
uagcuccacuucacaugcu

SEQ ID NO: 30 - RNA, 19 nt, artificial
  RNA Oligomer
agccuccacucaacaaugu

SEQ ID NO: 31 - RNA, 19 nt, artificial
  RNA Oligomer
acccagauuuuuuccaccu

SEQ ID NO: 32 - RNA, 19 nt, artificial
  RNA Oligomer
ugcacccagauuuuuucca

SEQ ID NO: 33 - RNA, 19 nt, artificial
  RNA Oligomer
aaacgggucaauuuacgaa

SEQ ID NO: 34 - RNA, 19 nt, artificial
  RNA Oligomer
augaugaauaccugugagg

SEQ ID NO: 35 - RNA, 19 nt, artificial
  RNA Oligomer
uugagugaaugaugaauac

SEQ ID NO: 36 - RNA, 19 nt, artificial
  RNA Oligomer
cggcaauaauggaacugcu

SEQ ID NO: 37 - RNA, 19 nt, artificial
  RNA Oligomer
gccuaucaaaacuuccaaa

SEQ ID NO: 38 - RNA, 19 nt, artificial
  RNA Oligomer
uggcuuuuuuuucucuaag

SEQ ID NO: 39 - RNA, 19 nt, artificial
  RNA Oligomer
gcccauuugaguuuuacau

SEQ ID NO: 40 - RNA, 19 nt, artificial
  RNA Oligomer
ggccagcauuucagaauug

SEQ ID NO: 41 - RNA, 19 nt, artificial
  RNA Oligomer
cggccagcauuucagaauu

SEQ ID NO: 42 - RNA, 19 nt, artificial
  RNA Oligomer
gcgucguaccuacuuuuga

SEQ ID NO: 43 - RNA, 19 nt, artificial
  RNA Oligomer
uagcgucguaccuacuuuu

SEQ ID NO: 44 - RNA, 19 nt, artificial
  RNA Oligomer
augcacgugaacuuggaaa

SEQ ID NO: 45 - RNA, 19 nt, artificial
  RNA Oligomer
uuguccuuuuuccacuaac

SEQ ID NO: 46 - RNA, 19 nt, artificial
  RNA Oligomer
guuguccuuuuuccacuaa

SEQ ID NO: 47 - RNA, 19 nt, artificial
  RNA Oligomer
cuguuguccuuuuuccacu

SEQ ID NO: 48 - RNA, 19 nt, artificial
  RNA Oligomer
cuggagaacugucugucca

SEQ ID NO: 49 - RNA, 19 nt, artificial
  RNA Oligomer
gccaaucuuuauagaauug

SEQ ID NO: 50 - RNA, 19 nt, artificial
  RNA Oligomer
guucaaauuagccaguguu

SEQ ID NO: 51 - RNA, 19 nt, artificial
  RNA Oligomer
ugccagaauuugguuaaaa

SEQ ID NO: 52 - RNA, 19 nt, artificial
  RNA Oligomer
cccagauuuuuuccaccuu

SEQ ID NO: 53 - RNA, 19 nt, artificial
  RNA Oligomer
cacccagauuuuuuccacc

SEQ ID NO: 54 - RNA, 19 nt, artificial
  RNA Oligomer
caauuuacgaagucugcau

SEQ ID NO: 55 - RNA, 19 nt, artificial
  RNA Oligomer
gggucaauuuacgaagucu

SEQ ID NO: 56 - RNA, 19 nt, artificial
  RNA Oligomer
aacgggucaauuuacgaag

SEQ ID NO: 57 - RNA, 19 nt, artificial
  RNA Oligomer
ugaaacgggucaauuuacg

SEQ ID NO: 58 - RNA, 19 nt, artificial
  RNA Oligomer
uggugccauuucaguaacc

SEQ ID NO: 59 - RNA, 19 nt, artificial
  RNA Oligomer
uggaacugcuucacuguuu

SEQ ID NO: 60 - RNA, 19 nt, artificial
  RNA Oligomer
aagguaggauuaaguaggu

SEQ ID NO: 61 - RNA, 19 nt, artificial
  RNA Oligomer
caggaagguaggauuaagu

SEQ ID NO: 62 - RNA, 19 nt, artificial
  RNA Oligomer
agccuaucaaaacuuccaa

SEQ ID NO: 63 - RNA, 19 nt, artificial
  RNA Oligomer
aaccagauuugccuauuuu

SEQ ID NO: 64 - RNA, 19 nt, artificial
  RNA Oligomer
guacagaauugaaugggau

SEQ ID NO: 65 - RNA, 19 nt, artificial
  RNA Oligomer
aucccauuuuuguacagaa

SEQ ID NO: 66 - RNA, 19 nt, artificial
  RNA Oligomer
cagcuaaagucauuuguag

SEQ ID NO: 67 - RNA, 19 nt, artificial
  RNA Oligomer
augauuggguaguaaaacu

SEQ ID NO: 68 - RNA, 19 nt, artificial
  RNA Oligomer
aggguccuaaaaagggaaa

SEQ ID NO: 69 - RNA, 19 nt, artificial
  RNA Oligomer
acgugaacuuggaaauuga

SEQ ID NO: 70 - RNA, 19 nt, artificial
  RNA Oligomer
gaauugcucaagauguccu

SEQ ID NO: 71 - RNA, 19 nt, artificial
  RNA Oligomer
gagaauugcucaagauguc

SEQ ID NO: 72 - RNA, 19 nt, artificial
  RNA Oligomer
agagaauugcucaagaugu

SEQ ID NO: 73 - RNA, 19 nt, artificial
  RNA Oligomer
ccagagaauugcucaagau

SEQ ID NO: 74 - RNA, 19 nt, artificial
  RNA Oligomer
cccagagaauugcucaaga

SEQ ID NO: 75 - RNA, 19 nt, artificial
  RNA Oligomer
aacugucuguccaaaucaa

SEQ ID NO: 76 - RNA, 19 nt, artificial
  RNA Oligomer
uguccuuuuuccacuaaca

SEQ ID NO: 77 - RNA, 19 nt, artificial
  RNA Oligomer
gaacuguuguccuuuuucc

SEQ ID NO: 78 - RNA, 19 nt, artificial
  RNA Oligomer
ggagaacugucuguccaaa

SEQ ID NO: 79 - RNA, 19 nt, artificial
  RNA Oligomer
caguguucuaacaaacuaa

SEQ ID NO: 80 - RNA, 19 nt, artificial
  RNA Oligomer
aaauuagccaguguucuaa

SEQ ID NO: 81 - RNA, 19 nt, artificial
  RNA Oligomer
gaccuaaaaugucacuguu

SEQ ID NO: 82 - RNA, 19 nt, artificial
  RNA Oligomer
uugccagaauuugguuaaa

SEQ ID NO: 83 - RNA, 19 nt, artificial
  RNA Oligomer
uggauaaggagcuuauuca

SEQ ID NO: 84 - RNA, 19 nt, artificial
  RNA Oligomer
agcaaggcuuucauauccu

SEQ ID NO: 85 - RNA, 19 nt, artificial
  RNA Oligomer
cuccacucaacaauguuca

SEQ ID NO: 86 - RNA, 19 nt, artificial
  RNA Oligomer
uuagccuccacucaacaau

SEQ ID NO: 87 - RNA, 19 nt, artificial
  RNA Oligomer
agagaauuuagccuccacu

SEQ ID NO: 88 - RNA, 19 nt, artificial
  RNA Oligomer
agaucauuaucucuuuccu

SEQ ID NO: 89 - RNA, 19 nt, artificial
  RNA Oligomer
ggccuuauuuuuugucuua

SEQ ID NO: 90 - RNA, 19 nt, artificial
  RNA Oligomer
cagauuuuuuccaccuugg

SEQ ID NO: 91 - RNA, 19 nt, artificial
  RNA Oligomer
ccagauuuuuuccaccuug

SEQ ID NO: 92 - RNA, 19 nt, artificial
  RNA Oligomer
gccuagagaaugaaacuca

SEQ ID NO: 93 - RNA, 19 nt, artificial
  RNA Oligomer
uacgaagucugcauuggcu

SEQ ID NO: 94 - RNA, 19 nt, artificial
  RNA Oligomer
cgggucaauuuacgaaguc

SEQ ID NO: 95 - RNA, 19 nt, artificial
  RNA Oligomer
gaaacgggucaauuuacga

SEQ ID NO: 96 - RNA, 19 nt, artificial
  RNA Oligomer
gucccucucugauucacuu

SEQ ID NO: 97 - RNA, 19 nt, artificial
  RNA Oligomer
gagaggggacuccuaagaa

SEQ ID NO: 98 - RNA, 19 nt, artificial
  RNA Oligomer
gaagguaggauuaaguagg

SEQ ID NO: 99 - RNA, 19 nt, artificial
  RNA Oligomer
uagccuaucaaaacuucca

SEQ ID NO: 100 - RNA, 19 nt, artificial
  RNA Oligomer
ccauuuuuguacagaauug

SEQ ID NO: 101 - RNA, 19 nt, artificial
  RNA Oligomer
uagaucccauuuuuguaca

SEQ ID NO: 102 - RNA, 19 nt, artificial
  RNA Oligomer
gcagcuaacaggcugauuu

SEQ ID NO: 103 - RNA, 19 nt, artificial
  RNA Oligomer
guguuucacauucauagca

SEQ ID NO: 104 - RNA, 19 nt, artificial
  RNA Oligomer
guccuaaaaagggaaaaua

SEQ ID NO: 105 - RNA, 19 nt, artificial
  RNA Oligomer
ggguccuaaaaagggaaaa

SEQ ID NO: 106 - RNA, 19 nt, artificial
  RNA Oligomer
aaggguccuaaaaagggaa

SEQ ID NO: 107 - RNA, 19 nt, artificial
  RNA Oligomer
cagggacuuuuucuuuagu

SEQ ID NO: 108 - RNA, 19 nt, artificial
  RNA Oligomer
ugcacgugaacuuggaaau

SEQ ID NO: 109 - RNA, 19 nt, artificial
  RNA Oligomer
guguuaugcacgugaacuu

SEQ ID NO: 110 - RNA, 19 nt, artificial
  RNA Oligomer
guuguguuaugcacgugaa

SEQ ID NO: 111 - RNA, 19 nt, artificial
  RNA Oligomer
gagguuguguuaugcacgu

SEQ ID NO: 112 - RNA, 19 nt, artificial
  RNA Oligomer
gacccagagaauugcucaa

SEQ ID NO: 113 - RNA, 19 nt, artificial
  RNA Oligomer
aagcaaacuaaacuugguu

SEQ ID NO: 114 - RNA, 19 nt, artificial
  RNA Oligomer
ccaaaucaaagcaaacuaa

SEQ ID NO: 115 - RNA, 19 nt, artificial
  RNA Oligomer
ggaaggcuguuaaauuaau

SEQ ID NO: 116 - RNA, 19 nt, artificial
  RNA Oligomer
ugccuguuaugcuuacaaa

SEQ ID NO: 117 - RNA, 19 nt, artificial
  RNA Oligomer
uugccuguuaugcuuacaa

SEQ ID NO: 118 - RNA, 19 nt, artificial
  RNA Oligomer
ugacucucuugccuguuau

SEQ ID NO: 119 - RNA, 19 nt, artificial
  RNA Oligomer
guccuuuuuccacuaacag

SEQ ID NO: 120 - RNA, 19 nt, artificial
  RNA Oligomer
uagaacuguuguccuuuuu

SEQ ID NO: 121 - RNA, 19 nt, artificial
  RNA Oligomer
guagaacuguuguccuuuu

SEQ ID NO: 122 - RNA, 19 nt, artificial
  RNA Oligomer
gagaacugucuguccaaau

SEQ ID NO: 123 - RNA, 19 nt, artificial
  RNA Oligomer
gccaagauaaaucaauguu

SEQ ID NO: 124 - RNA, 19 nt, artificial
  RNA Oligomer
acaaagccaaucuuuauag

SEQ ID NO: 125 - RNA, 19 nt, artificial
  RNA Oligomer
augucacuguucaaauuag

SEQ ID NO: 126 - RNA, 19 nt, artificial
  RNA Oligomer
gugauccuguuacugauac

SEQ ID NO: 127 - RNA, 19 nt, artificial
  RNA Oligomer
gaauuugguuaaaaugcug

SEQ ID NO: 128 - RNA, 19 nt, artificial
  RNA Oligomer
aggcuuucauauccuugcu

SEQ ID NO: 129 - RNA, 19 nt, artificial
  RNA Oligomer
cagcaaggcuuucauaucc

SEQ ID NO: 130 - RNA, 19 nt, artificial
  RNA Oligomer
gccuccacucaacaauguu

SEQ ID NO: 131 - RNA, 19 nt, artificial
  RNA Oligomer
gaauuuagccuccacucaa

SEQ ID NO: 132 - RNA, 19 nt, artificial
  RNA Oligomer
gagagaauuuagccuccac

SEQ ID NO: 133 - RNA, 19 nt, artificial
  RNA Oligomer
uagaucauuaucucuuucc

SEQ ID NO: 134 - RNA, 19 nt, artificial
  RNA Oligomer
aggccuuauuuuuugucuu

SEQ ID NO: 135 - RNA, 19 nt, artificial
  RNA Oligomer
aaggccuuauuuuuugucu

SEQ ID NO: 136 - RNA, 19 nt, artificial
  RNA Oligomer
gcaugcacccagauuuuuu

SEQ ID NO: 137 - RNA, 19 nt, artificial
  RNA Oligomer
ggucaauuuacgaagucug

SEQ ID NO: 138 - RNA, 19 nt, artificial
  RNA Oligomer
gggcuuuucugggaauuga

SEQ ID NO: 139 - RNA, 19 nt, artificial
  RNA Oligomer
auaccugugaggauaggaa

SEQ ID NO: 140 - RNA, 19 nt, artificial
  RNA Oligomer
acucuuccauugagugaau

SEQ ID NO: 141 - RNA, 19 nt, artificial
  RNA Oligomer
gggauuauguuguuccuga

SEQ ID NO: 142 - RNA, 19 nt, artificial
  RNA Oligomer
ugccauuucaguaaccacg

SEQ ID NO: 143 - RNA, 19 nt, artificial
  RNA Oligomer
uguggugccauuucaguaa

SEQ ID NO: 144 - RNA, 19 nt, artificial
  RNA Oligomer
agcuuguggugccauuuca

SEQ ID NO: 145 - RNA, 19 nt, artificial
  RNA Oligomer
cucuaauguuuuaaagagg

SEQ ID NO: 146 - RNA, 19 nt, artificial
  RNA Oligomer
gaacugcuucacuguuucu

SEQ ID NO: 147 - RNA, 19 nt, artificial
  RNA Oligomer
ggaacugcuucacuguuuc

SEQ ID NO: 148 - RNA, 19 nt, artificial
  RNA Oligomer
acggcaauaauggaacugc

SEQ ID NO: 149 - RNA, 19 nt, artificial
  RNA Oligomer
acccuagguaagaguaaau

SEQ ID NO: 150 - RNA, 19 nt, artificial
  RNA Oligomer
cucuaaguuuucagaggau

SEQ ID NO: 151 - RNA, 19 nt, artificial
  RNA Oligomer
gcuugguaauagacuauau

SEQ ID NO: 152 - RNA, 19 nt, artificial
  RNA Oligomer
aggcuugguaauagacuau

SEQ ID NO: 153 - RNA, 19 nt, artificial
  RNA Oligomer
gaguuuuacauuugauucc

SEQ ID NO: 154 - RNA, 19 nt, artificial
  RNA Oligomer
gaagcccauuugaguuuua

SEQ ID NO: 155 - RNA, 19 nt, artificial
  RNA Oligomer
gagccugcuaagugauuuu

SEQ ID NO: 156 - RNA, 19 nt, artificial
  RNA Oligomer
uguacagaauugaauggga

SEQ ID NO: 157 - RNA, 19 nt, artificial
  RNA Oligomer
uuguacagaauugaauggg

SEQ ID NO: 158 - RNA, 19 nt, artificial
  RNA Oligomer
gugauucaaaauaguguag

SEQ ID NO: 159 - RNA, 19 nt, artificial
  RNA Oligomer
uuggagaagugauucaaaa

SEQ ID NO: 160 - RNA, 19 nt, artificial
  RNA Oligomer
caggcugauuuucuggccu

SEQ ID NO: 161 - RNA, 19 nt, artificial
  RNA Oligomer
gcuaacaggcugauuuucu

SEQ ID NO: 162 - RNA, 19 nt, artificial
  RNA Oligomer
gcuaaagucauuuguaguu

SEQ ID NO: 163 - RNA, 19 nt, artificial
  RNA Oligomer
uagucagcuaaagucauuu

SEQ ID NO: 164 - RNA, 19 nt, artificial
  RNA Oligomer
cuagucagcuaaagucauu

SEQ ID NO: 165 - RNA, 19 nt, artificial
  RNA Oligomer
ugauuggguaguaaaacua

SEQ ID NO: 166 - RNA, 19 nt, artificial
  RNA Oligomer
gcauuucagaauugcugga

SEQ ID NO: 167 - RNA, 19 nt, artificial
  RNA Oligomer
gaaggguccuaaaaaggga

SEQ ID NO: 168 - RNA, 19 nt, artificial
  RNA Oligomer
gguuucaggagaacucuga

SEQ ID NO: 169 - RNA, 19 nt, artificial
  RNA Oligomer
uccucugguuucaggagaa

SEQ ID NO: 170 - RNA, 19 nt, artificial
  RNA Oligomer
agggacuuuuucuuuagua

SEQ ID NO: 171 - RNA, 19 nt, artificial
  RNA Oligomer
cuacuuuugagcuuacacu

SEQ ID NO: 172 - RNA, 19 nt, artificial
  RNA Oligomer
cuagcgucguaccuacuuu

SEQ ID NO: 173 - RNA, 19 nt, artificial
  RNA Oligomer
guaaaaagcuggauaggau

SEQ ID NO: 174 - RNA, 19 nt, artificial
  RNA Oligomer
uuaugcacgugaacuugga

SEQ ID NO: 175 - RNA, 19 nt, artificial
  RNA Oligomer
gguuguguuaugcacguga

SEQ ID NO: 176 - RNA, 19 nt, artificial
  RNA Oligomer
gcgagguuguguuaugcac

SEQ ID NO: 177 - RNA, 19 nt, artificial
  RNA Oligomer
aaagcaaacuaaacuuggu

SEQ ID NO: 178 - RNA, 19 nt, artificial
  RNA Oligomer
cuguuaugcuuacaaaaug

SEQ ID NO: 179 - RNA, 19 nt, artificial
  RNA Oligomer
uccuuuuuccacuaacagu

SEQ ID NO: 180 - RNA, 19 nt, artificial
  RNA Oligomer
caaucuuuauagaauuggg

SEQ ID NO: 181 - RNA, 19 nt, artificial
  RNA Oligomer
ccaaucuuuauagaauugg

SEQ ID NO: 182 - RNA, 19 nt, artificial
  RNA Oligomer
auacuacaaagccaaucuu

SEQ ID NO: 183 - RNA, 19 nt, artificial
  RNA Oligomer
ccaguguucuaacaaacua

SEQ ID NO: 184 - RNA, 19 nt, artificial
  RNA Oligomer
acuguucaaauuagccagu

SEQ ID NO: 185 - RNA, 19 nt, artificial
  RNA Oligomer
ccuaaaaugucacuguuca

SEQ ID NO: 186 - RNA, 19 nt, artificial
  RNA Oligomer
ugaccuaaaaugucacugu

SEQ ID NO: 187 - RNA, 19 nt, artificial
  RNA Oligomer
uaagugaccuaaaauguca

SEQ ID NO: 188 - RNA, 19 nt, artificial
  RNA Oligomer
cuauaagugaccuaaaaug

SEQ ID NO: 189 - RNA, 19 nt, artificial
  RNA Oligomer
gugugauccuguuacugau

SEQ ID NO: 190 - RNA, 19 nt, artificial
  RNA Oligomer
ccacuucacaugcuggaga

SEQ ID NO: 191 - RNA, 19 nt, artificial
  RNA Oligomer
ggcuuucauauccuugcug

SEQ ID NO: 192 - RNA, 19 nt, artificial
  RNA Oligomer
gcaaggcuuucauauccuu

SEQ ID NO: 193 - RNA, 19 nt, artificial
  RNA Oligomer
cacucaacaauguucaauu

SEQ ID NO: 194 - RNA, 19 nt, artificial
  RNA Oligomer
uagccuccacucaacaaug

SEQ ID NO: 195 - RNA, 19 nt, artificial
  RNA Oligomer
guagaucauuaucucuuuc

SEQ ID NO: 196 - RNA, 19 nt, artificial
  RNA Oligomer
ccaccuuggauaccuguca

SEQ ID NO: 197 - RNA, 19 nt, artificial
  RNA Oligomer
augcaugcacccagauuuu

SEQ ID NO: 198 - RNA, 19 nt, artificial
  RNA Oligomer
uugaaacgggucaauuuac

SEQ ID NO: 199 - RNA, 19 nt, artificial
  RNA Oligomer
ucaacgagguaauauuuga

SEQ ID NO: 200 - RNA, 19 nt, artificial
  RNA Oligomer
accucaacgagguaauauu

SEQ ID NO: 201 - RNA, 19 nt, artificial
  RNA Oligomer
ccaaccucaacgagguaau

SEQ ID NO: 202 - RNA, 19 nt, artificial
  RNA Oligomer
gugcuuaaucucagaugaa

SEQ ID NO: 203 - RNA, 19 nt, artificial
  RNA Oligomer
cuagucccucucugauuca

SEQ ID NO: 204 - RNA, 19 nt, artificial
  RNA Oligomer
augaauaccugugaggaua

SEQ ID NO: 205 - RNA, 19 nt, artificial
  RNA Oligomer
agaggggacuccuaagaag

SEQ ID NO: 206 - RNA, 19 nt, artificial
  RNA Oligomer
gauuacucuuccauugagu

SEQ ID NO: 207 - RNA, 19 nt, artificial
  RNA Oligomer
ugauuacucuuccauugag

SEQ ID NO: 208 - RNA, 19 nt, artificial
  RNA Oligomer
uaguugauuacucuuccau

SEQ ID NO: 209 - RNA, 19 nt, artificial
  RNA Oligomer
guaguugauuacucuucca

SEQ ID NO: 210 - RNA, 19 nt, artificial
  RNA Oligomer
guguugaauacugucuuua

SEQ ID NO: 211 - RNA, 19 nt, artificial
  RNA Oligomer
aagcucaguuuccccuguu

SEQ ID NO: 212 - RNA, 19 nt, artificial
  RNA Oligomer
accacgguguuguuuuaga

SEQ ID NO: 213 - RNA, 19 nt, artificial
  RNA Oligomer
gugccauuucaguaaccac

SEQ ID NO: 214 - RNA, 19 nt, artificial
  RNA Oligomer
ggugccauuucaguaacca

SEQ ID NO: 215 - RNA, 19 nt, artificial
  RNA Oligomer
cugcuucacuguuucuugg

SEQ ID NO: 216 - RNA, 19 nt, artificial
  RNA Oligomer
aacugcuucacuguuucuu

SEQ ID NO: 217 - RNA, 19 nt, artificial
  RNA Oligomer
caauaauggaacugcuuca

SEQ ID NO: 218 - RNA, 19 nt, artificial
  RNA Oligomer
agguaagaguaaaugagaa

SEQ ID NO: 219 - RNA, 19 nt, artificial
  RNA Oligomer
ggauuaaguaggugaguuu

SEQ ID NO: 220 - RNA, 19 nt, artificial
  RNA Oligomer
gacucaaauuugaaggguu

SEQ ID NO: 221 - RNA, 19 nt, artificial
  RNA Oligomer
cagauuugccuauuuugau

SEQ ID NO: 222 - RNA, 19 nt, artificial
  RNA Oligomer
ccagauuugccuauuuuga

SEQ ID NO: 223 - RNA, 19 nt, artificial
  RNA Oligomer
auauaaaccagauuugccu

SEQ ID NO: 224 - RNA, 19 nt, artificial
  RNA Oligomer
ggcuugguaauagacuaua

SEQ ID NO: 225 - RNA, 19 nt, artificial
  RNA Oligomer
uuccacaauuugguuucag

SEQ ID NO: 226 - RNA, 19 nt, artificial
  RNA Oligomer
uuugauuccacaauuuggu

SEQ ID NO: 227 - RNA, 19 nt, artificial
  RNA Oligomer
ggaauagguaagcaaaagu

SEQ ID NO: 228 - RNA, 19 nt, artificial
  RNA Oligomer
cagaauugaaugggaugga

SEQ ID NO: 229 - RNA, 19 nt, artificial
  RNA Oligomer
gaucccauuuuuguacaga

SEQ ID NO: 230 - RNA, 19 nt, artificial
  RNA Oligomer
agaucccauuuuuguacag

SEQ ID NO: 231 - RNA, 19 nt, artificial
  RNA Oligomer
guguagauuuucugcauag

SEQ ID NO: 232 - RNA, 19 nt, artificial
  RNA Oligomer
aggcugauuuucuggccuu

SEQ ID NO: 233 - RNA, 19 nt, artificial
  RNA Oligomer
cacauucauagcaacugca

SEQ ID NO: 234 - RNA, 19 nt, artificial
  RNA Oligomer
ccccaccugcccuaaauaa

SEQ ID NO: 235 - RNA, 19 nt, artificial
  RNA Oligomer
agcuaaagucauuuguagu

SEQ ID NO: 236 - RNA, 19 nt, artificial
  RNA Oligomer
ucagcuaaagucauuugua

SEQ ID NO: 237 - RNA, 19 nt, artificial
  RNA Oligomer
cagcuagucagcuaaaguc

SEQ ID NO: 238 - RNA, 19 nt, artificial
  RNA Oligomer
uggguaguaaaacuauuca

SEQ ID NO: 239 - RNA, 19 nt, artificial
  RNA Oligomer
gauuauuucaugauugggu

SEQ ID NO: 240 - RNA, 19 nt, artificial
  RNA Oligomer
gguccuaaaaagggaaaau

SEQ ID NO: 241 - RNA, 19 nt, artificial
  RNA Oligomer
cagcauuucagaauugcug

SEQ ID NO: 242 - RNA, 19 nt, artificial
  RNA Oligomer
gccagcauuucagaauugc

SEQ ID NO: 243 - RNA, 19 nt, artificial
  RNA Oligomer
agaacucugauccucagcu

SEQ ID NO: 244 - RNA, 19 nt, artificial
  RNA Oligomer
uaagaagccaccugccugu

SEQ ID NO: 245 - RNA, 19 nt, artificial
  RNA Oligomer
cuccucugguuucaggaga

SEQ ID NO: 246 - RNA, 19 nt, artificial
  RNA Oligomer
gggacuuuuucuuuaguag

SEQ ID NO: 247 - RNA, 19 nt, artificial
  RNA Oligomer
agcuuacacuuguguuuaa

SEQ ID NO: 248 - RNA, 19 nt, artificial
  RNA Oligomer
gucguaccuacuuuugagc

SEQ ID NO: 249 - RNA, 19 nt, artificial
  RNA Oligomer
agcgucguaccuacuuuug

SEQ ID NO: 250 - RNA, 19 nt, artificial
  RNA Oligomer
aagcuggauaggauugugu

SEQ ID NO: 251 - RNA, 19 nt, artificial
  RNA Oligomer
uugcgagguuguguuaugc

SEQ ID NO: 252 - RNA, 19 nt, artificial
  RNA Oligomer
uugcucaagauguccugcg

SEQ ID NO: 253 - RNA, 19 nt, artificial
  RNA Oligomer
acccagagaauugcucaag

SEQ ID NO: 254 - RNA, 19 nt, artificial
  RNA Oligomer
ucaaagcaaacuaaacuug

SEQ ID NO: 255 - RNA, 19 nt, artificial
  RNA Oligomer
uccaaaucaaagcaaacua

SEQ ID NO: 256 - RNA, 19 nt, artificial
  RNA Oligomer
auggaaggcuguuaaauua

SEQ ID NO: 257 - RNA, 19 nt, artificial
  RNA Oligomer
cuguccaaaucaaagcaaa

SEQ ID NO: 258 - RNA, 19 nt, artificial
  RNA Oligomer
gucuguccaaaucaaagca

SEQ ID NO: 259 - RNA, 19 nt, artificial
  RNA Oligomer
guuaugcuuacaaaauggu

SEQ ID NO: 260 - RNA, 19 nt, artificial
  RNA Oligomer
uugacucucuugccuguua

SEQ ID NO: 261 - RNA, 19 nt, artificial
  RNA Oligomer
ccuuuuuccacuaacaguu

SEQ ID NO: 262 - RNA, 19 nt, artificial
  RNA Oligomer
gaacugucuguccaaauca

SEQ ID NO: 263 - RNA, 19 nt, artificial
  RNA Oligomer
ugggcaucgauguagaacu

SEQ ID NO: 264 - RNA, 19 nt, artificial
  RNA Oligomer
aaagguucacuguguuucu

SEQ ID NO: 265 - RNA, 19 nt, artificial
  RNA Oligomer
uccaaagguucacuguguu

SEQ ID NO: 266 - RNA, 19 nt, artificial
  RNA Oligomer
gcaugucuauuguuaagcu

SEQ ID NO: 267 - RNA, 19 nt, artificial
  RNA Oligomer
ucaauguuguuuugcaugu

SEQ ID NO: 268 - RNA, 19 nt, artificial
  RNA Oligomer
uugggccaagauaaaucaa

SEQ ID NO: 269 - RNA, 19 nt, artificial
  RNA Oligomer
auugggccaagauaaauca

SEQ ID NO: 270 - RNA, 19 nt, artificial
  RNA Oligomer
caaagccaaucuuuauaga

SEQ ID NO: 271 - RNA, 19 nt, artificial
  RNA Oligomer
cuacaaagccaaucuuuau

SEQ ID NO: 272 - RNA, 19 nt, artificial
  RNA Oligomer
acuaaacucuucaaaugcu

SEQ ID NO: 273 - RNA, 19 nt, artificial
  RNA Oligomer
guguucuaacaaacuaaac

SEQ ID NO: 274 - RNA, 19 nt, artificial
  RNA Oligomer
ucacuguucaaauuagcca

SEQ ID NO: 275 - RNA, 19 nt, artificial
  RNA Oligomer
cuguuacugauacuauaag

SEQ ID NO: 276 - RNA, 19 nt, artificial
  RNA Oligomer
uccuguuacugauacuaua

SEQ ID NO: 277 - RNA, 19 nt, artificial
  RNA Oligomer
auccuguuacugauacuau

SEQ ID NO: 278 - RNA, 19 nt, artificial
  RNA Oligomer
caggugugauccuguuacu

SEQ ID NO: 279 - RNA, 19 nt, artificial
  RNA Oligomer
uagggacagauguauucau

SEQ ID NO: 280 - RNA, 19 nt, artificial
  RNA Oligomer
gcuauuagcuccacuucac

SEQ ID NO: 281 - RNA, 19 nt, artificial
  RNA Oligomer
gcccuagcuauuagcucca

SEQ ID NO: 282 - RNA, 19 nt, artificial
  RNA Oligomer
ucguggauaaggagcuuau

SEQ ID NO: 283 - RNA, 19 nt, artificial
  RNA Oligomer
aaggcuuucauauccuugc

SEQ ID NO: 284 - RNA, 19 nt, artificial
  RNA Oligomer
ccacucaacaauguucaau

SEQ ID NO: 285 - RNA, 19 nt, artificial
  RNA Oligomer
ccuccacucaacaauguuc

SEQ ID NO: 286 - RNA, 19 nt, artificial
  RNA Oligomer
ggauaccugucacuaggga

SEQ ID NO: 287 - RNA, 19 nt, artificial
  RNA Oligomer
accuuggauaccugucacu

SEQ ID NO: 288 - RNA, 19 nt, artificial
  RNA Oligomer
ucaccguccagauaaccau

SEQ ID NO: 289 - RNA, 19 nt, artificial
  RNA Oligomer
aacucaccguccagauaac

SEQ ID NO: 290 - RNA, 19 nt, artificial
  RNA Oligomer
gagauaugguuuauaguac

SEQ ID NO: 291 - RNA, 19 nt, artificial
  RNA Oligomer
gcauuggcuauggagauau

SEQ ID NO: 292 - RNA, 19 nt, artificial
  RNA Oligomer
aacgagguaauauuugagg

SEQ ID NO: 293 - RNA, 19 nt, artificial
  RNA Oligomer
caacgagguaauauuugag

SEQ ID NO: 294 - RNA, 19 nt, artificial
  RNA Oligomer
cuguauacuaccacuuuga

SEQ ID NO: 295 - RNA, 19 nt, artificial
  RNA Oligomer
uagcuguauacuaccacuu

SEQ ID NO: 296 - RNA, 19 nt, artificial
  RNA Oligomer
guagcuguauacuaccacu

SEQ ID NO: 297 - RNA, 19 nt, artificial
  RNA Oligomer
uggcaguguuaucucaucu

SEQ ID NO: 298 - RNA, 19 nt, artificial
  RNA Oligomer
ucucagaugaaccauuuca

SEQ ID NO: 299 - RNA, 19 nt, artificial
  RNA Oligomer
uaaucucagaugaaccauu

SEQ ID NO: 300 - RNA, 19 nt, artificial
  RNA Oligomer
cccucucugauucacuuag

SEQ ID NO: 301 - RNA, 19 nt, artificial
  RNA Oligomer
agucccucucugauucacu

SEQ ID NO: 302 - RNA, 19 nt, artificial
  RNA Oligomer
uagucccucucugauucac

SEQ ID NO: 303 - RNA, 19 nt, artificial
  RNA Oligomer
uugauuacucuuccauuga

SEQ ID NO: 304 - RNA, 19 nt, artificial
  RNA Oligomer
guguaguugauuacucuuc

SEQ ID NO: 305 - RNA, 19 nt, artificial
  RNA Oligomer
ccccuguucuuaaguguug

SEQ ID NO: 306 - RNA, 19 nt, artificial
  RNA Oligomer
uuccccuguucuuaagugu

SEQ ID NO: 307 - RNA, 19 nt, artificial
  RNA Oligomer
caguuuccccuguucuuaa

SEQ ID NO: 308 - RNA, 19 nt, artificial
  RNA Oligomer
gccuuuauaagcucaguuu

SEQ ID NO: 309 - RNA, 19 nt, artificial
  RNA Oligomer
guguuguuuuagaugccuu

SEQ ID NO: 310 - RNA, 19 nt, artificial
  RNA Oligomer
acgguguuguuuuagaugc

SEQ ID NO: 311 - RNA, 19 nt, artificial
  RNA Oligomer
ccacgguguuguuuuagau

SEQ ID NO: 312 - RNA, 19 nt, artificial
  RNA Oligomer
ucaguaaccacgguguugu

SEQ ID NO: 313 - RNA, 19 nt, artificial
  RNA Oligomer
ccauuucaguaaccacggu

SEQ ID NO: 314 - RNA, 19 nt, artificial
  RNA Oligomer
guaggauuaaguaggugag

SEQ ID NO: 315 - RNA, 19 nt, artificial
  RNA Oligomer
gguaggauuaaguagguga

SEQ ID NO: 316 - RNA, 19 nt, artificial
  RNA Oligomer
aaggguuuuuagacaggaa

SEQ ID NO: 317 - RNA, 19 nt, artificial
  RNA Oligomer
uugaaggguuuuuagacag

SEQ ID NO: 318 - RNA, 19 nt, artificial
  RNA Oligomer
caguuccugacucaaauuu

SEQ ID NO: 319 - RNA, 19 nt, artificial
  RNA Oligomer
accaguuccugacucaaau

SEQ ID NO: 320 - RNA, 19 nt, artificial
  RNA Oligomer
ccuaucaaaacuuccaaaa

SEQ ID NO: 321 - RNA, 19 nt, artificial
  RNA Oligomer
ugcuaagugauuuugacua

SEQ ID NO: 322 - RNA, 19 nt, artificial
  RNA Oligomer
uccacaauuugguuucagg

SEQ ID NO: 323 - RNA, 19 nt, artificial
  RNA Oligomer
ugauuccacaauuugguuu

SEQ ID NO: 324 - RNA, 19 nt, artificial
  RNA Oligomer
auagaucccauuuuuguac

SEQ ID NO: 325 - RNA, 19 nt, artificial
  RNA Oligomer
cagagagccugcuaaguga

SEQ ID NO: 326 - RNA, 19 nt, artificial
  RNA Oligomer
guagauuuucugcauagau

SEQ ID NO: 327 - RNA, 19 nt, artificial
  RNA Oligomer
uaguguagauuuucugcau

SEQ ID NO: 328 - RNA, 19 nt, artificial
  RNA Oligomer
auaguguagauuuucugca

SEQ ID NO: 329 - RNA, 19 nt, artificial
  RNA Oligomer
uguuucacauucauagcaa

SEQ ID NO: 330 - RNA, 19 nt, artificial
  RNA Oligomer
caccugcccuaaauaagaa

SEQ ID NO: 331 - RNA, 19 nt, artificial
  RNA Oligomer
aaagucauuuguaguuugc

SEQ ID NO: 332 - RNA, 19 nt, artificial
  RNA Oligomer
gcuagucagcuaaagucau

SEQ ID NO: 333 - RNA, 19 nt, artificial
  RNA Oligomer
ucagcuagucagcuaaagu

SEQ ID NO: 334 - RNA, 19 nt, artificial
  RNA Oligomer
ggguaguaaaacuauucag

SEQ ID NO: 335 - RNA, 19 nt, artificial
  RNA Oligomer
ccagcauuucagaauugcu

SEQ ID NO: 336 - RNA, 19 nt, artificial
  RNA Oligomer
cagcucaggauuucgacuu

SEQ ID NO: 337 - RNA, 19 nt, artificial
  RNA Oligomer
gaacucugauccucagcuc

SEQ ID NO: 338 - RNA, 19 nt, artificial
  RNA Oligomer
cgcuucuccucugguuuca

SEQ ID NO: 339 - RNA, 19 nt, artificial
  RNA Oligomer
gacuuuuucuuuaguagag

SEQ ID NO: 340 - RNA, 19 nt, artificial
  RNA Oligomer
ucagggacuuuuucuuuag

SEQ ID NO: 341 - RNA, 19 nt, artificial
  RNA Oligomer
uucagggacuuuuucuuua

SEQ ID NO: 342 - RNA, 19 nt, artificial
  RNA Oligomer
cuuuugagcuuacacuugu

SEQ ID NO: 343 - RNA, 19 nt, artificial
  RNA Oligomer
uaccuacuuuugagcuuac

SEQ ID NO: 344 - RNA, 19 nt, artificial
  RNA Oligomer
guaccuacuuuugagcuua

SEQ ID NO: 345 - RNA, 19 nt, artificial
  RNA Oligomer
gugaacuuggaaauugaaa

SEQ ID NO: 346 - RNA, 19 nt, artificial
  RNA Oligomer
gcacgugaacuuggaaauu

SEQ ID NO: 347 - RNA, 19 nt, artificial
  RNA Oligomer
ucccugagaaacugaccca

SEQ ID NO: 348 - RNA, 19 nt, artificial
  RNA Oligomer
agguccuugucccugagaa

SEQ ID NO: 349 - RNA, 19 nt, artificial
  RNA Oligomer
gcaaacuaaacuugguugc

SEQ ID NO: 350 - RNA, 19 nt, artificial
  RNA Oligomer
guccaaaucaaagcaaacu

SEQ ID NO: 351 - RNA, 19 nt, artificial
  RNA Oligomer
ucuguccaaaucaaagcaa

SEQ ID NO: 352 - RNA, 19 nt, artificial
  RNA Oligomer
ccuguuaugcuuacaaaau

SEQ ID NO: 353 - RNA, 19 nt, artificial
  RNA Oligomer
gccuguuaugcuuacaaaa

SEQ ID NO: 354 - RNA, 19 nt, artificial
  RNA Oligomer
caguuaucuuugacucucu

SEQ ID NO: 355 - RNA, 19 nt, artificial
  RNA Oligomer
cacuaacaguuaucuuuga

SEQ ID NO: 356 - RNA, 19 nt, artificial
  RNA Oligomer
uccacuaacaguuaucuuu

SEQ ID NO: 357 - RNA, 19 nt, artificial
  RNA Oligomer
agaacugucuguccaaauc

SEQ ID NO: 358 - RNA, 19 nt, artificial
  RNA Oligomer
ugacugggcaaggcuucuu

SEQ ID NO: 359 - RNA, 19 nt, artificial
  RNA Oligomer
ucacuguguuucugccgcu

SEQ ID NO: 360 - RNA, 19 nt, artificial
  RNA Oligomer
aagguucacuguguuucug

SEQ ID NO: 361 - RNA, 19 nt, artificial
  RNA Oligomer
ccaagauaaaucaauguug

SEQ ID NO: 362 - RNA, 19 nt, artificial
  RNA Oligomer
gauacuacaaagccaaucu

SEQ ID NO: 363 - RNA, 19 nt, artificial
  RNA Oligomer
aaagauacuacaaagccaa

SEQ ID NO: 364 - RNA, 19 nt, artificial
  RNA Oligomer
gaaagauacuacaaagcca

SEQ ID NO: 365 - RNA, 19 nt, artificial
  RNA Oligomer
uggaaagauacuacaaagc

SEQ ID NO: 366 - RNA, 19 nt, artificial
  RNA Oligomer
uuggaaagauacuacaaag

SEQ ID NO: 367 - RNA, 19 nt, artificial
  RNA Oligomer
ugcuuggaaagauacuaca

SEQ ID NO: 368 - RNA, 19 nt, artificial
  RNA Oligomer
augcuuggaaagauacuac

SEQ ID NO: 369 - RNA, 19 nt, artificial
  RNA Oligomer
cuaaacucuucaaaugcuu

SEQ ID NO: 370 - RNA, 19 nt, artificial
  RNA Oligomer
aagugaccuaaaaugucac

SEQ ID NO: 371 - RNA, 19 nt, artificial
  RNA Oligomer
ugauccuguuacugauacu

SEQ ID NO: 372 - RNA, 19 nt, artificial
  RNA Oligomer
acaggugugauccuguuac

SEQ ID NO: 373 - RNA, 19 nt, artificial
  RNA Oligomer
auccugguguuacugaaaa

SEQ ID NO: 374 - RNA, 19 nt, artificial
  RNA Oligomer
ggacagauguauucauccu

SEQ ID NO: 375 - RNA, 19 nt, artificial
  RNA Oligomer
agcuccacuucacaugcug

SEQ ID NO: 376 - RNA, 19 nt, artificial
  RNA Oligomer
agcuauuagcuccacuuca

SEQ ID NO: 377 - RNA, 19 nt, artificial
  RNA Oligomer
cuugccagaauuugguuaa

SEQ ID NO: 378 - RNA, 19 nt, artificial
  RNA Oligomer
aaggagcuuauucagguuu

SEQ ID NO: 379 - RNA, 19 nt, artificial
  RNA Oligomer
gcuuucauauccuugcugu

SEQ ID NO: 380 - RNA, 19 nt, artificial
  RNA Oligomer
ugagagaauuuagccucca

SEQ ID NO: 381 - RNA, 19 nt, artificial
  RNA Oligomer
augagagaauuuagccucc

SEQ ID NO: 382 - RNA, 19 nt, artificial
  RNA Oligomer
ggaaucaacuugccagaau

SEQ ID NO: 383 - RNA, 19 nt, artificial
  RNA Oligomer
uagggaauaauaaaggccu

SEQ ID NO: 384 - RNA, 19 nt, artificial
  RNA Oligomer
ucacuagggaauaauaaag

SEQ ID NO: 385 - RNA, 19 nt, artificial
  RNA Oligomer
accugucacuagggaauaa

SEQ ID NO: 386 - RNA, 19 nt, artificial
  RNA Oligomer
auaccugucacuagggaau

SEQ ID NO: 387 - RNA, 19 nt, artificial
  RNA Oligomer
uuggauaccugucacuagg

SEQ ID NO: 388 - RNA, 19 nt, artificial
  RNA Oligomer
caccuuggauaccugucac

SEQ ID NO: 389 - RNA, 19 nt, artificial
  RNA Oligomer
accguccagauaaccaugc

SEQ ID NO: 390 - RNA, 19 nt, artificial
  RNA Oligomer
gaagucugcauuggcuaug

SEQ ID NO: 391 - RNA, 19 nt, artificial
  RNA Oligomer
gaauuauugaaacggguca

SEQ ID NO: 392 - RNA, 19 nt, artificial
  RNA Oligomer
uaguagcuguauacuacca

SEQ ID NO: 393 - RNA, 19 nt, artificial
  RNA Oligomer
ggguaguagcuguauacua

SEQ ID NO: 394 - RNA, 19 nt, artificial
  RNA Oligomer
gucaaggguaguagcugua

SEQ ID NO: 395 - RNA, 19 nt, artificial
  RNA Oligomer
ugaaguaucucuccuuaac

SEQ ID NO: 396 - RNA, 19 nt, artificial
  RNA Oligomer
uugaaguaucucuccuuaa

SEQ ID NO: 397 - RNA, 19 nt, artificial
  RNA Oligomer
gggaauugaaguaucucuc

SEQ ID NO: 398 - RNA, 19 nt, artificial
  RNA Oligomer
ugggaauugaaguaucucu

SEQ ID NO: 399 - RNA, 19 nt, artificial
  RNA Oligomer
ggcuuuucugggaauugaa

SEQ ID NO: 400 - RNA, 19 nt, artificial
  RNA Oligomer
cccaaccucaacgagguaa

SEQ ID NO: 401 - RNA, 19 nt, artificial
  RNA Oligomer
gcaguguuaucucaucucu

SEQ ID NO: 402 - RNA, 19 nt, artificial
  RNA Oligomer
cucagaugaaccauuucac

SEQ ID NO: 403 - RNA, 19 nt, artificial
  RNA Oligomer
cugaacccaaccucaacga

SEQ ID NO: 404 - RNA, 19 nt, artificial
  RNA Oligomer
cugauucacuuaguaaucu

SEQ ID NO: 405 - RNA, 19 nt, artificial
  RNA Oligomer
cucugauucacuuaguaau

SEQ ID NO: 406 - RNA, 19 nt, artificial
  RNA Oligomer
ccucucugauucacuuagu

SEQ ID NO: 407 - RNA, 19 nt, artificial
  RNA Oligomer
aggaaacagagccguugac

SEQ ID NO: 408 - RNA, 19 nt, artificial
  RNA Oligomer
uacucuuccauugagugaa

SEQ ID NO: 409 - RNA, 19 nt, artificial
  RNA Oligomer
guguguaguugauuacucu

SEQ ID NO: 410 - RNA, 19 nt, artificial
  RNA Oligomer
gaacugauauuuuugugug

SEQ ID NO: 411 - RNA, 19 nt, artificial
  RNA Oligomer
aaguguugaauacugucuu

SEQ ID NO: 412 - RNA, 19 nt, artificial
  RNA Oligomer
uccccuguucuuaaguguu

SEQ ID NO: 413 - RNA, 19 nt, artificial
  RNA Oligomer
gcucaguuuccccuguucu

SEQ ID NO: 414 - RNA, 19 nt, artificial
  RNA Oligomer
agcucaguuuccccuguuc

SEQ ID NO: 415 - RNA, 19 nt, artificial
  RNA Oligomer
ggauuauguuguuccugaa

SEQ ID NO: 416 - RNA, 19 nt, artificial
  RNA Oligomer
uaagcucaguuuccccugu

SEQ ID NO: 417 - RNA, 19 nt, artificial
  RNA Oligomer
ugccuuuauaagcucaguu

SEQ ID NO: 418 - RNA, 19 nt, artificial
  RNA Oligomer
agaugccuuuauaagcuca

SEQ ID NO: 419 - RNA, 19 nt, artificial
  RNA Oligomer
uuagaugccuuuauaagcu

SEQ ID NO: 420 - RNA, 19 nt, artificial
  RNA Oligomer
cgguguuguuuuagaugcc

SEQ ID NO: 421 - RNA, 19 nt, artificial
  RNA Oligomer
uaaccacgguguuguuuua

SEQ ID NO: 422 - RNA, 19 nt, artificial
  RNA Oligomer
cuacugggauuauguuguu

SEQ ID NO: 423 - RNA, 19 nt, artificial
  RNA Oligomer
acuacugggauuauguugu

SEQ ID NO: 424 - RNA, 19 nt, artificial
  RNA Oligomer
auggaacugcuucacuguu

SEQ ID NO: 425 - RNA, 19 nt, artificial
  RNA Oligomer
uuacggcaauaauggaacu

SEQ ID NO: 426 - RNA, 19 nt, artificial
  RNA Oligomer
aggugaguuuaauuaaagc

SEQ ID NO: 427 - RNA, 19 nt, artificial
  RNA Oligomer
aggauuaaguaggugaguu

SEQ ID NO: 428 - RNA, 19 nt, artificial
  RNA Oligomer
acaggaagguaggauuaag

SEQ ID NO: 429 - RNA, 19 nt, artificial
  RNA Oligomer
aggguuuuuagacaggaag

SEQ ID NO: 430 - RNA, 19 nt, artificial
  RNA Oligomer
gaaggguuuuuagacagga

SEQ ID NO: 431 - RNA, 19 nt, artificial
  RNA Oligomer
ugaaggguuuuuagacagg

SEQ ID NO: 432 - RNA, 19 nt, artificial
  RNA Oligomer
uuugaaggguuuuuagaca

SEQ ID NO: 433 - RNA, 19 nt, artificial
  RNA Oligomer
gugauuuugacuacuggga

SEQ ID NO: 434 - RNA, 19 nt, artificial
  RNA Oligomer
uccugacucaaauuugaag

SEQ ID NO: 435 - RNA, 19 nt, artificial
  RNA Oligomer
ucucuaaguuuucagagga

SEQ ID NO: 436 - RNA, 19 nt, artificial
  RNA Oligomer
agguaggcuugguaauaga

SEQ ID NO: 437 - RNA, 19 nt, artificial
  RNA Oligomer
acaauuugguuucagguag

SEQ ID NO: 438 - RNA, 19 nt, artificial
  RNA Oligomer
guuuuacauuugauuccac

SEQ ID NO: 439 - RNA, 19 nt, artificial
  RNA Oligomer
aagcccauuugaguuuuac

SEQ ID NO: 440 - RNA, 19 nt, artificial
  RNA Oligomer
uagaagcccauuugaguuu

SEQ ID NO: 441 - RNA, 19 nt, artificial
  RNA Oligomer
aagcaaaaguagaagccca

SEQ ID NO: 442 - RNA, 19 nt, artificial
  RNA Oligomer
uagguaagcaaaaguagaa

SEQ ID NO: 443 - RNA, 19 nt, artificial
  RNA Oligomer
gaauagguaagcaaaagua

SEQ ID NO: 444 - RNA, 19 nt, artificial
  RNA Oligomer
ggauggaauagguaagcaa

SEQ ID NO: 445 - RNA, 19 nt, artificial
  RNA Oligomer
gggauggaauagguaagca

SEQ ID NO: 446 - RNA, 19 nt, artificial
  RNA Oligomer
agaauugaaugggauggaa

SEQ ID NO: 447 - RNA, 19 nt, artificial
  RNA Oligomer
cugcauagaucccauuuuu

SEQ ID NO: 448 - RNA, 19 nt, artificial
  RNA Oligomer
uagauuuucugcauagauc

SEQ ID NO: 449 - RNA, 19 nt, artificial
  RNA Oligomer
ggccuuuggagaagugauu

SEQ ID NO: 450 - RNA, 19 nt, artificial
  RNA Oligomer
acuguggcuaucacccaga

SEQ ID NO: 451 - RNA, 19 nt, artificial
  RNA Oligomer
ggcugauuuucuggccuuu

SEQ ID NO: 452 - RNA, 19 nt, artificial
  RNA Oligomer
acaggcugauuuucuggcc

SEQ ID NO: 453 - RNA, 19 nt, artificial
  RNA Oligomer
aacaggcugauuuucuggc

SEQ ID NO: 454 - RNA, 19 nt, artificial
  RNA Oligomer
cugcagcuaacaggcugau

SEQ ID NO: 455 - RNA, 19 nt, artificial
  RNA Oligomer
agcaacugcagcuaacagg

SEQ ID NO: 456 - RNA, 19 nt, artificial
  RNA Oligomer
uagcaacugcagcuaacag

SEQ ID NO: 457 - RNA, 19 nt, artificial
  RNA Oligomer
ucauagcaacugcagcuaa

SEQ ID NO: 458 - RNA, 19 nt, artificial
  RNA Oligomer
ucacauucauagcaacugc

SEQ ID NO: 459 - RNA, 19 nt, artificial
  RNA Oligomer
cagaauugcuggacugugg

SEQ ID NO: 460 - RNA, 19 nt, artificial
  RNA Oligomer
gcccuaaauaagaaacccc

SEQ ID NO: 461 - RNA, 19 nt, artificial
  RNA Oligomer
ccaccugcccuaaauaaga

SEQ ID NO: 462 - RNA, 19 nt, artificial
  RNA Oligomer
gucauuuguaguuugcccc

SEQ ID NO: 463 - RNA, 19 nt, artificial
  RNA Oligomer
guaaaacuauucagcuagu

SEQ ID NO: 464 - RNA, 19 nt, artificial
  RNA Oligomer
uuggguaguaaaacuauuc

SEQ ID NO: 465 - RNA, 19 nt, artificial
  RNA Oligomer
ccucagcucaggauuucga

SEQ ID NO: 466 - RNA, 19 nt, artificial
  RNA Oligomer
ggagaacucugauccucag

SEQ ID NO: 467 - RNA, 19 nt, artificial
  RNA Oligomer
ucgcuucuccucugguuuc

SEQ ID NO: 468 - RNA, 19 nt, artificial
  RNA Oligomer
gucgcuucuccucugguuu

SEQ ID NO: 469 - RNA, 19 nt, artificial
  RNA Oligomer
ggacuuuuucuuuaguaga

SEQ ID NO: 470 - RNA, 19 nt, artificial
  RNA Oligomer
uggacuagcuucagggacu

SEQ ID NO: 471 - RNA, 19 nt, artificial
  RNA Oligomer
ugcucauggacuagcuuca

SEQ ID NO: 472 - RNA, 19 nt, artificial
  RNA Oligomer
accuacuuuugagcuuaca

SEQ ID NO: 473 - RNA, 19 nt, artificial
  RNA Oligomer
ucguaccuacuuuugagcu

SEQ ID NO: 474 - RNA, 19 nt, artificial
  RNA Oligomer
cgucguaccuacuuuugag

SEQ ID NO: 475 - RNA, 19 nt, artificial
  RNA Oligomer
cacgugaacuuggaaauug

SEQ ID NO: 476 - RNA, 19 nt, artificial
  RNA Oligomer
ugcgagguuguguuaugca

SEQ ID NO: 477 - RNA, 19 nt, artificial
  RNA Oligomer
uugucccugagaaacugac

SEQ ID NO: 478 - RNA, 19 nt, artificial
  RNA Oligomer
uccuugucccugagaaacu

SEQ ID NO: 479 - RNA, 19 nt, artificial
  RNA Oligomer
ugaccaugguugcaacugg

SEQ ID NO: 480 - RNA, 19 nt, artificial
  RNA Oligomer
aacuaaacuugguugcuca

SEQ ID NO: 481 - RNA, 19 nt, artificial
  RNA Oligomer
agcaaacuaaacuugguug

SEQ ID NO: 482 - RNA, 19 nt, artificial
  RNA Oligomer
uguuaugcuuacaaaaugg

SEQ ID NO: 483 - RNA, 19 nt, artificial
  RNA Oligomer
acugucuguccaaaucaaa

SEQ ID NO: 484 - RNA, 19 nt, artificial
  RNA Oligomer
cuaacaguuaucuuugacu

SEQ ID NO: 485 - RNA, 19 nt, artificial
  RNA Oligomer
gggcaucgauguagaacug

SEQ ID NO: 486 - RNA, 19 nt, artificial
  RNA Oligomer
uccuggaguugucaccacu

SEQ ID NO: 487 - RNA, 19 nt, artificial
  RNA Oligomer
uuguuaagcuccaaagguu

SEQ ID NO: 488 - RNA, 19 nt, artificial
  RNA Oligomer
uugcaugucuauuguuaag

SEQ ID NO: 489 - RNA, 19 nt, artificial
  RNA Oligomer
auguuguuuugcaugucua

SEQ ID NO: 490 - RNA, 19 nt, artificial
  RNA Oligomer
aagauacuacaaagccaau

SEQ ID NO: 491 - RNA, 19 nt, artificial
  RNA Oligomer
cuuggaaagauacuacaaa

SEQ ID NO: 492 - RNA, 19 nt, artificial
  RNA Oligomer
ugucacuguucaaauuagc

SEQ ID NO: 493 - RNA, 19 nt, artificial
  RNA Oligomer
ugauacuauaagugaccua

SEQ ID NO: 494 - RNA, 19 nt, artificial
  RNA Oligomer
ccguugaccaugguugcaa

SEQ ID NO: 495 - RNA, 19 nt, artificial
  RNA Oligomer
guguuacugaaaaacaggu

SEQ ID NO: 496 - RNA, 19 nt, artificial
  RNA Oligomer
agggacagauguauucauc

SEQ ID NO: 497 - RNA, 19 nt, artificial
  RNA Oligomer
ggcguagggacagauguau

SEQ ID NO: 498 - RNA, 19 nt, artificial
  RNA Oligomer
cuccacuucacaugcugga

SEQ ID NO: 499 - RNA, 19 nt, artificial
  RNA Oligomer
uuccugcccuagcuauuag

SEQ ID NO: 500 - RNA, 19 nt, artificial
  RNA Oligomer
aggagcuuauucagguuuc

SEQ ID NO: 501 - RNA, 19 nt, artificial
  RNA Oligomer
auaaggagcuuauucaggu

SEQ ID NO: 502 - RNA, 19 nt, artificial
  RNA Oligomer
caacuugccagaauuuggu

SEQ ID NO: 503 - RNA, 19 nt, artificial
  RNA Oligomer
aauucagcaaggcuuucau

SEQ ID NO: 504 - RNA, 19 nt, artificial
  RNA Oligomer
ucaacaauguucaauucag

SEQ ID NO: 505 - RNA, 19 nt, artificial
  RNA Oligomer
uccacucaacaauguucaa

SEQ ID NO: 506 - RNA, 19 nt, artificial
  RNA Oligomer
uuccaacuaaguagaucau

SEQ ID NO: 507 - RNA, 19 nt, artificial
  RNA Oligomer
agggaauaauaaaggccuu

SEQ ID NO: 508 - RNA, 19 nt, artificial
  RNA Oligomer
cacuagggaauaauaaagg

SEQ ID NO: 509 - RNA, 19 nt, artificial
  RNA Oligomer
gaggaaucaacuugccaga

SEQ ID NO: 510 - RNA, 19 nt, artificial
  RNA Oligomer
ccugucacuagggaauaau

SEQ ID NO: 511 - RNA, 19 nt, artificial
  RNA Oligomer
caugcaugcacccagauuu

SEQ ID NO: 512 - RNA, 19 nt, artificial
  RNA Oligomer
guccagauaaccaugcaug

SEQ ID NO: 513 - RNA, 19 nt, artificial
  RNA Oligomer
ccguccagauaaccaugca

SEQ ID NO: 514 - RNA, 19 nt, artificial
  RNA Oligomer
gaaugaaacucaccgucca

SEQ ID NO: 515 - RNA, 19 nt, artificial
  RNA Oligomer
gagaaugaaacucaccguc

SEQ ID NO: 516 - RNA, 19 nt, artificial
  RNA Oligomer
acagccuagagaaugaaac

SEQ ID NO: 517 - RNA, 19 nt, artificial
  RNA Oligomer
cugcauuggcuauggagau

SEQ ID NO: 518 - RNA, 19 nt, artificial
  RNA Oligomer
agucugcauuggcuaugga

SEQ ID NO: 519 - RNA, 19 nt, artificial
  RNA Oligomer
aagucugcauuggcuaugg

SEQ ID NO: 520 - RNA, 19 nt, artificial
  RNA Oligomer
uugaauuauugaaacgggu

SEQ ID NO: 521 - RNA, 19 nt, artificial
  RNA Oligomer
gcuguauacuaccacuuug

SEQ ID NO: 522 - RNA, 19 nt, artificial
  RNA Oligomer
aaggguaguagcuguauac

SEQ ID NO: 523 - RNA, 19 nt, artificial
  RNA Oligomer
gaaguaucucuccuuaacc

SEQ ID NO: 524 - RNA, 19 nt, artificial
  RNA Oligomer
uucugggaauugaaguauc

SEQ ID NO: 525 - RNA, 19 nt, artificial
  RNA Oligomer
aacccaaccucaacgaggu

SEQ ID NO: 526 - RNA, 19 nt, artificial
  RNA Oligomer
augaaccauuucaccaugg

SEQ ID NO: 527 - RNA, 19 nt, artificial
  RNA Oligomer
agaugaaccauuucaccau

SEQ ID NO: 528 - RNA, 19 nt, artificial
  RNA Oligomer
aaucucagaugaaccauuu

SEQ ID NO: 529 - RNA, 19 nt, artificial
  RNA Oligomer
ugugcuuaaucucagauga

SEQ ID NO: 530 - RNA, 19 nt, artificial
  RNA Oligomer
augugcuuaaucucagaug

SEQ ID NO: 531 - RNA, 19 nt, artificial
  RNA Oligomer
acaugugcuuaaucucaga

SEQ ID NO: 532 - RNA, 19 nt, artificial
  RNA Oligomer
uacaugugcuuaaucucag

SEQ ID NO: 533 - RNA, 19 nt, artificial
  RNA Oligomer
ccucuuuucaguauuacau

SEQ ID NO: 534 - RNA, 19 nt, artificial
  RNA Oligomer
cucucugauucacuuagua

SEQ ID NO: 535 - RNA, 19 nt, artificial
  RNA Oligomer
auguuguuccugaacccaa

SEQ ID NO: 536 - RNA, 19 nt, artificial
  RNA Oligomer
cccuguucuuaaguguuga

SEQ ID NO: 537 - RNA, 19 nt, artificial
  RNA Oligomer
augccuuuauaagcucagu

SEQ ID NO: 538 - RNA, 19 nt, artificial
  RNA Oligomer
cugggauuauguuguuccu

SEQ ID NO: 539 - RNA, 19 nt, artificial
  RNA Oligomer
cuaauguuuuaaagaggca

SEQ ID NO: 540 - RNA, 19 nt, artificial
  RNA Oligomer
uugacuacugggauuaugu

SEQ ID NO: 541 - RNA, 19 nt, artificial
  RNA Oligomer
ugagaaauauuacggcaau

SEQ ID NO: 542 - RNA, 19 nt, artificial
  RNA Oligomer
augagaaauauuacggcaa

SEQ ID NO: 543 - RNA, 19 nt, artificial
  RNA Oligomer
gguaagaguaaaugagaaa

SEQ ID NO: 544 - RNA, 19 nt, artificial
  RNA Oligomer
cuagguaagaguaaaugag

SEQ ID NO: 545 - RNA, 19 nt, artificial
  RNA Oligomer
aacccuagguaagaguaaa

SEQ ID NO: 546 - RNA, 19 nt, artificial
  RNA Oligomer
ggugaguuuaauuaaagcu

SEQ ID NO: 547 - RNA, 19 nt, artificial
  RNA Oligomer
uagacaggaagguaggauu

SEQ ID NO: 548 - RNA, 19 nt, artificial
  RNA Oligomer
ugacucaaauuugaagggu

SEQ ID NO: 549 - RNA, 19 nt, artificial
  RNA Oligomer
cugacucaaauuugaaggg

SEQ ID NO: 550 - RNA, 19 nt, artificial
  RNA Oligomer
caccaguuccugacucaaa

SEQ ID NO: 551 - RNA, 19 nt, artificial
  RNA Oligomer
accaccaguuccugacuca

SEQ ID NO: 552 - RNA, 19 nt, artificial
  RNA Oligomer
aaagcccacaccaccaguu

SEQ ID NO: 553 - RNA, 19 nt, artificial
  RNA Oligomer
uaggcuugguaauagacua

SEQ ID NO: 554 - RNA, 19 nt, artificial
  RNA Oligomer
caauuugguuucagguagg

SEQ ID NO: 555 - RNA, 19 nt, artificial
  RNA Oligomer
agcccauuugaguuuuaca

SEQ ID NO: 556 - RNA, 19 nt, artificial
  RNA Oligomer
gccugcuaagugauuuuga

SEQ ID NO: 557 - RNA, 19 nt, artificial
  RNA Oligomer
agcaaaaguagaagcccau

SEQ ID NO: 558 - RNA, 19 nt, artificial
  RNA Oligomer
guaagcaaaaguagaagcc

SEQ ID NO: 559 - RNA, 19 nt, artificial
  RNA Oligomer
gagagccugcuaagugauu

SEQ ID NO: 560 - RNA, 19 nt, artificial
  RNA Oligomer
gcauagaucccauuuuugu

SEQ ID NO: 561 - RNA, 19 nt, artificial
  RNA Oligomer
aguguagauuuucugcaua

SEQ ID NO: 562 - RNA, 19 nt, artificial
  RNA Oligomer
uggagaagugauucaaaau

SEQ ID NO: 563 - RNA, 19 nt, artificial
  RNA Oligomer
acugcagcuaacaggcuga

SEQ ID NO: 564 - RNA, 19 nt, artificial
  RNA Oligomer
cuguguuucacauucauag

SEQ ID NO: 565 - RNA, 19 nt, artificial
  RNA Oligomer
uucuguguuucacauucau

SEQ ID NO: 566 - RNA, 19 nt, artificial
  RNA Oligomer
cccaaauguagucucuuuu

SEQ ID NO: 567 - RNA, 19 nt, artificial
  RNA Oligomer
ccccaaauguagucucuuu

SEQ ID NO: 568 - RNA, 19 nt, artificial
  RNA Oligomer
aaccccaaauguagucucu

SEQ ID NO: 569 - RNA, 19 nt, artificial
  RNA Oligomer
cugcccuaaauaagaaacc

SEQ ID NO: 570 - RNA, 19 nt, artificial
  RNA Oligomer
accugcccuaaauaagaaa

SEQ ID NO: 571 - RNA, 19 nt, artificial
  RNA Oligomer
cccaccugcccuaaauaag

SEQ ID NO: 572 - RNA, 19 nt, artificial
  RNA Oligomer
cucacugauuggaacaaca

SEQ ID NO: 573 - RNA, 19 nt, artificial
  RNA Oligomer
cucaggauuucgacuuguu

SEQ ID NO: 574 - RNA, 19 nt, artificial
  RNA Oligomer
gcucaggauuucgacuugu

SEQ ID NO: 575 - RNA, 19 nt, artificial
  RNA Oligomer
agcucaggauuucgacuug

SEQ ID NO: 576 - RNA, 19 nt, artificial
  RNA Oligomer
aggagaacucugauccuca

SEQ ID NO: 577 - RNA, 19 nt, artificial
  RNA Oligomer
ggcaguuugagcagcaaga

SEQ ID NO: 578 - RNA, 19 nt, artificial
  RNA Oligomer
ugagcuuacacuuguguuu

SEQ ID NO: 579 - RNA, 19 nt, artificial
  RNA Oligomer
uuugagcuuacacuugugu

SEQ ID NO: 580 - RNA, 19 nt, artificial
  RNA Oligomer
gugugugauucuagcgucg

SEQ ID NO: 581 - RNA, 19 nt, artificial
  RNA Oligomer
uugugugugauucuagcgu

SEQ ID NO: 582 - RNA, 19 nt, artificial
  RNA Oligomer
uggauaggauuguguguga

SEQ ID NO: 583 - RNA, 19 nt, artificial
  RNA Oligomer
aaaagcuggauaggauugu

SEQ ID NO: 584 - RNA, 19 nt, artificial
  RNA Oligomer
guauguaaaaagcuggaua

SEQ ID NO: 585 - RNA, 19 nt, artificial
  RNA Oligomer
auguauguaaaaagcugga

SEQ ID NO: 586 - RNA, 19 nt, artificial
  RNA Oligomer
cugacccagagaauugcuc

SEQ ID NO: 587 - RNA, 19 nt, artificial
  RNA Oligomer
augguugcaacuggcaguu

SEQ ID NO: 588 - RNA, 19 nt, artificial
  RNA Oligomer
uggaaggcuguuaaauuaa

SEQ ID NO: 589 - RNA, 19 nt, artificial
  RNA Oligomer
gcuuauggaaggcuguuaa

SEQ ID NO: 590 - RNA, 19 nt, artificial
  RNA Oligomer
cugucuguccaaaucaaag

SEQ ID NO: 591 - RNA, 19 nt, artificial
  RNA Oligomer
auguagaacuguuguccuu

SEQ ID NO: 592 - RNA, 19 nt, artificial
  RNA Oligomer
gcaucgauguagaacuguu

SEQ ID NO: 593 - RNA, 19 nt, artificial
  RNA Oligomer
aauguuguuuugcaugucu

SEQ ID NO: 594 - RNA, 19 nt, artificial
  RNA Oligomer
ugggccaagauaaaucaau

SEQ ID NO: 595 - RNA, 19 nt, artificial
  RNA Oligomer
gaauugggccaagauaaau

SEQ ID NO: 596 - RNA, 19 nt, artificial
  RNA Oligomer
agaauugggccaagauaaa

SEQ ID NO: 597 - RNA, 19 nt, artificial
  RNA Oligomer
cucuucaaaugcuuggaaa

SEQ ID NO: 598 - RNA, 19 nt, artificial
  RNA Oligomer
acucuucaaaugcuuggaa

SEQ ID NO: 599 - RNA, 19 nt, artificial
  RNA Oligomer
gucacuguucaaauuagcc

SEQ ID NO: 600 - RNA, 19 nt, artificial
  RNA Oligomer
gugaccuaaaaugucacug

SEQ ID NO: 601 - RNA, 19 nt, artificial
  RNA Oligomer
cugauacuauaagugaccu

SEQ ID NO: 602 - RNA, 19 nt, artificial
  RNA Oligomer
acugauacuauaagugacc

SEQ ID NO: 603 - RNA, 19 nt, artificial
  RNA Oligomer
uacugauacuauaagugac

SEQ ID NO: 604 - RNA, 19 nt, artificial
  RNA Oligomer
gauccuguuacugauacua

SEQ ID NO: 605 - RNA, 19 nt, artificial
  RNA Oligomer
ggugugauccuguuacuga

SEQ ID NO: 606 - RNA, 19 nt, artificial
  RNA Oligomer
cugaaaaacaggugugauc

SEQ ID NO: 607 - RNA, 19 nt, artificial
  RNA Oligomer
ugguguuacugaaaaacag

SEQ ID NO: 608 - RNA, 19 nt, artificial
  RNA Oligomer
cugguguuacugaaaaaca

SEQ ID NO: 609 - RNA, 19 nt, artificial
  RNA Oligomer
uccugguguuacugaaaaa

SEQ ID NO: 610 - RNA, 19 nt, artificial
  RNA Oligomer
acagauguauucauccugg

SEQ ID NO: 611 - RNA, 19 nt, artificial
  RNA Oligomer
gacagauguauucauccug

SEQ ID NO: 612 - RNA, 19 nt, artificial
  RNA Oligomer
gcguagggacagauguauu

SEQ ID NO: 613 - RNA, 19 nt, artificial
  RNA Oligomer
uccugcccuagcuauuagc

SEQ ID NO: 614 - RNA, 19 nt, artificial
  RNA Oligomer
guggauaaggagcuuauuc

SEQ ID NO: 615 - RNA, 19 nt, artificial
  RNA Oligomer
ugcugugggucguggauaa

SEQ ID NO: 616 - RNA, 19 nt, artificial
  RNA Oligomer
gaaucaacuugccagaauu

SEQ ID NO: 617 - RNA, 19 nt, artificial
  RNA Oligomer
ccaacuaaguagaucauua

SEQ ID NO: 618 - RNA, 19 nt, artificial
  RNA Oligomer
aaaggccuuauuuuuuguc

SEQ ID NO: 619 - RNA, 19 nt, artificial
  RNA Oligomer
ggaauaauaaaggccuuau

SEQ ID NO: 620 - RNA, 19 nt, artificial
  RNA Oligomer
gggaauaauaaaggccuua

SEQ ID NO: 621 - RNA, 19 nt, artificial
  RNA Oligomer
aaccaugcaugcacccaga

SEQ ID NO: 622 - RNA, 19 nt, artificial
  RNA Oligomer
cagauaaccaugcaugcac

SEQ ID NO: 623 - RNA, 19 nt, artificial
  RNA Oligomer
cucaccguccagauaacca

SEQ ID NO: 624 - RNA, 19 nt, artificial
  RNA Oligomer
augaaacucaccguccaga

SEQ ID NO: 625 - RNA, 19 nt, artificial
  RNA Oligomer
agagaaugaaacucaccgu

SEQ ID NO: 626 - RNA, 19 nt, artificial
  RNA Oligomer
guacagccuagagaaugaa

SEQ ID NO: 627 - RNA, 19 nt, artificial
  RNA Oligomer
augguuuauaguacagccu

SEQ ID NO: 628 - RNA, 19 nt, artificial
  RNA Oligomer
auggagauaugguuuauag

SEQ ID NO: 629 - RNA, 19 nt, artificial
  RNA Oligomer
uggcuauggagauaugguu

SEQ ID NO: 630 - RNA, 19 nt, artificial
  RNA Oligomer
ugcauuggcuauggagaua

SEQ ID NO: 631 - RNA, 19 nt, artificial
  RNA Oligomer
guauacuaccacuuugaau

SEQ ID NO: 632 - RNA, 19 nt, artificial
  RNA Oligomer
agcuguauacuaccacuuu

SEQ ID NO: 633 - RNA, 19 nt, artificial
  RNA Oligomer
gguaguagcuguauacuac

SEQ ID NO: 634 - RNA, 19 nt, artificial
  RNA Oligomer
caaggguaguagcuguaua

SEQ ID NO: 635 - RNA, 19 nt, artificial
  RNA Oligomer
uccuuaaccccaauuguca

SEQ ID NO: 636 - RNA, 19 nt, artificial
  RNA Oligomer
aaguaucucuccuuaaccc

SEQ ID NO: 637 - RNA, 19 nt, artificial
  RNA Oligomer
ucugggaauugaaguaucu

SEQ ID NO: 638 - RNA, 19 nt, artificial
  RNA Oligomer
uuucugggaauugaaguau

SEQ ID NO: 639 - RNA, 19 nt, artificial
  RNA Oligomer
ggcaguguuaucucaucuc

SEQ ID NO: 640 - RNA, 19 nt, artificial
  RNA Oligomer
auggcaguguuaucucauc

SEQ ID NO: 641 - RNA, 19 nt, artificial
  RNA Oligomer
caccauggcaguguuaucu

SEQ ID NO: 642 - RNA, 19 nt, artificial
  RNA Oligomer
ugcuuaaucucagaugaac

SEQ ID NO: 643 - RNA, 19 nt, artificial
  RNA Oligomer
caugugcuuaaucucagau

SEQ ID NO: 644 - RNA, 19 nt, artificial
  RNA Oligomer
uuacaugugcuuaaucuca

SEQ ID NO: 645 - RNA, 19 nt, artificial
  RNA Oligomer
caguauuacaugugcuuaa

SEQ ID NO: 646 - RNA, 19 nt, artificial
  RNA Oligomer
ucacuuaguaaucuauccu

SEQ ID NO: 647 - RNA, 19 nt, artificial
  RNA Oligomer
cugugaggauaggaaauua

SEQ ID NO: 648 - RNA, 19 nt, artificial
  RNA Oligomer
aguguugaauacugucuuu

SEQ ID NO: 649 - RNA, 19 nt, artificial
  RNA Oligomer
uaaguguugaauacugucu

SEQ ID NO: 650 - RNA, 19 nt, artificial
  RNA Oligomer
cuguucuuaaguguugaau

SEQ ID NO: 651 - RNA, 19 nt, artificial
  RNA Oligomer
ccuguucuuaaguguugaa

SEQ ID NO: 652 - RNA, 19 nt, artificial
  RNA Oligomer
gaugccuuuauaagcucag

SEQ ID NO: 653 - RNA, 19 nt, artificial
  RNA Oligomer
uagaugccuuuauaagcuc

SEQ ID NO: 654 - RNA, 19 nt, artificial
  RNA Oligomer
gguguuguuuuagaugccu

SEQ ID NO: 655 - RNA, 19 nt, artificial
  RNA Oligomer
uaaagaggcaacaaaagcu

SEQ ID NO: 656 - RNA, 19 nt, artificial
  RNA Oligomer
guuuuaaagaggcaacaaa

SEQ ID NO: 657 - RNA, 19 nt, artificial
  RNA Oligomer
auguuuuaaagaggcaaca

SEQ ID NO: 658 - RNA, 19 nt, artificial
  RNA Oligomer
gcuucacuguuucuuggug

SEQ ID NO: 659 - RNA, 19 nt, artificial
  RNA Oligomer
gagaaauauuacggcaaua

SEQ ID NO: 660 - RNA, 19 nt, artificial
  RNA Oligomer
acucaaauuugaaggguuu

SEQ ID NO: 661 - RNA, 19 nt, artificial
  RNA Oligomer
aagugauuuugacuacugg

SEQ ID NO: 662 - RNA, 19 nt, artificial
  RNA Oligomer
uaagugauuuugacuacug

SEQ ID NO: 663 - RNA, 19 nt, artificial
  RNA Oligomer
cacagaaucauacuaaaug

SEQ ID NO: 664 - RNA, 19 nt, artificial
  RNA Oligomer
gcuaagugauuuugacuac

SEQ ID NO: 665 - RNA, 19 nt, artificial
  RNA Oligomer
cagguaggcuugguaauag

SEQ ID NO: 666 - RNA, 19 nt, artificial
  RNA Oligomer
ugggauggaauagguaagc

SEQ ID NO: 667 - RNA, 19 nt, artificial
  RNA Oligomer
augggauggaauagguaag

SEQ ID NO: 668 - RNA, 19 nt, artificial
  RNA Oligomer
uagucucuuuucuuucugu

SEQ ID NO: 669 - RNA, 19 nt, artificial
  RNA Oligomer
aagaaaccccaaauguagu

SEQ ID NO: 670 - RNA, 19 nt, artificial
  RNA Oligomer
cccuaaauaagaaacccca

SEQ ID NO: 671 - RNA, 19 nt, artificial
  RNA Oligomer
gaacaacagugauugaagg

SEQ ID NO: 672 - RNA, 19 nt, artificial
  RNA Oligomer
cugauuggaacaacaguga

SEQ ID NO: 673 - RNA, 19 nt, artificial
  RNA Oligomer
gauccucagcucaggauuu

SEQ ID NO: 674 - RNA, 19 nt, artificial
  RNA Oligomer
uucaggagaacucugaucc

SEQ ID NO: 675 - RNA, 19 nt, artificial
  RNA Oligomer
uaguagaggucgcuucucc

SEQ ID NO: 676 - RNA, 19 nt, artificial
  RNA Oligomer
gcuucagggacuuuuucuu

SEQ ID NO: 677 - RNA, 19 nt, artificial
  RNA Oligomer
aagcaggagaacugcucau

SEQ ID NO: 678 - RNA, 19 nt, artificial
  RNA Oligomer
gagcuuacacuuguguuua

SEQ ID NO: 679 - RNA, 19 nt, artificial
  RNA Oligomer
gugugauucuagcgucgua

SEQ ID NO: 680 - RNA, 19 nt, artificial
  RNA Oligomer
aggauugugugugauucua

SEQ ID NO: 681 - RNA, 19 nt, artificial
  RNA Oligomer
gguccuugucccugagaaa

SEQ ID NO: 682 - RNA, 19 nt, artificial
  RNA Oligomer
acaaaauggugauggcuua

SEQ ID NO: 683 - RNA, 19 nt, artificial
  RNA Oligomer
cucucuugccuguuaugcu

SEQ ID NO: 684 - RNA, 19 nt, artificial
  RNA Oligomer
aucuuugacucucuugccu

SEQ ID NO: 685 - RNA, 19 nt, artificial
  RNA Oligomer
uuccacuaacaguuaucuu

SEQ ID NO: 686 - RNA, 19 nt, artificial
  RNA Oligomer
ucgauguagaacuguuguc

SEQ ID NO: 687 - RNA, 19 nt, artificial
  RNA Oligomer
ucuugggcaucgauguaga

SEQ ID NO: 688 - RNA, 19 nt, artificial
  RNA Oligomer
aaggcuucuugggcaucga

SEQ ID NO: 689 - RNA, 19 nt, artificial
  RNA Oligomer
gucuauuguuaagcuccaa

SEQ ID NO: 690 - RNA, 19 nt, artificial
  RNA Oligomer
ugucuauuguuaagcucca

SEQ ID NO: 691 - RNA, 19 nt, artificial
  RNA Oligomer
ugcaugucuauuguuaagc

SEQ ID NO: 692 - RNA, 19 nt, artificial
  RNA Oligomer
uguuuugcaugucuauugu

SEQ ID NO: 693 - RNA, 19 nt, artificial
  RNA Oligomer
uuguuuugcaugucuauug

SEQ ID NO: 694 - RNA, 19 nt, artificial
  RNA Oligomer
agugaccuaaaaugucacu

SEQ ID NO: 695 - RNA, 19 nt, artificial
  RNA Oligomer
guuacugauacuauaagug

SEQ ID NO: 696 - RNA, 19 nt, artificial
  RNA Oligomer
aaacaggugugauccuguu

SEQ ID NO: 697 - RNA, 19 nt, artificial
  RNA Oligomer
ucauccugguguuacugaa

SEQ ID NO: 698 - RNA, 19 nt, artificial
  RNA Oligomer
gauguauucauccuggugu

SEQ ID NO: 699 - RNA, 19 nt, artificial
  RNA Oligomer
cuagcuauuagcuccacuu

SEQ ID NO: 700 - RNA, 19 nt, artificial
  RNA Oligomer
uaaggagcuuauucagguu

SEQ ID NO: 701 - RNA, 19 nt, artificial
  RNA Oligomer
gucguggauaaggagcuua

SEQ ID NO: 702 - RNA, 19 nt, artificial
  RNA Oligomer
ugugggucguggauaagga

SEQ ID NO: 703 - RNA, 19 nt, artificial
  RNA Oligomer
uucauauccuugcuguggg

SEQ ID NO: 704 - RNA, 19 nt, artificial
  RNA Oligomer
uaaugagagaauuuagccu

SEQ ID NO: 705 - RNA, 19 nt, artificial
  RNA Oligomer
guuaaugagagaauuuagc

SEQ ID NO: 706 - RNA, 19 nt, artificial
  RNA Oligomer
cuuauuccaacuaaguaga

SEQ ID NO: 707 - RNA, 19 nt, artificial
  RNA Oligomer
uugucuuauuccaacuaag

SEQ ID NO: 708 - RNA, 19 nt, artificial
  RNA Oligomer
gucacuagggaauaauaaa

SEQ ID NO: 709 - RNA, 19 nt, artificial
  RNA Oligomer
cugucacuagggaauaaua

SEQ ID NO: 710 - RNA, 19 nt, artificial
  RNA Oligomer
cguccagauaaccaugcau

SEQ ID NO: 711 - RNA, 19 nt, artificial
  RNA Oligomer
uagagaaugaaacucaccg

SEQ ID NO: 712 - RNA, 19 nt, artificial
  RNA Oligomer
cuaccacuuugaauuauug

SEQ ID NO: 713 - RNA, 19 nt, artificial
  RNA Oligomer
ugucaaggguaguagcugu

SEQ ID NO: 714 - RNA, 19 nt, artificial
  RNA Oligomer
cucuccuuaaccccaauug

SEQ ID NO: 715 - RNA, 19 nt, artificial
  RNA Oligomer
gaugaaccauuucaccaug

SEQ ID NO: 716 - RNA, 19 nt, artificial
  RNA Oligomer
uuucaguauuacaugugcu

SEQ ID NO: 717 - RNA, 19 nt, artificial
  RNA Oligomer
uuccugaacccaaccucaa

SEQ ID NO: 718 - RNA, 19 nt, artificial
  RNA Oligomer
guaaucuauccucuuuuca

SEQ ID NO: 719 - RNA, 19 nt, artificial
  RNA Oligomer
uuguuccugaacccaaccu

SEQ ID NO: 720 - RNA, 19 nt, artificial
  RNA Oligomer
ggaaauuaguucugagauc

SEQ ID NO: 721 - RNA, 19 nt, artificial
  RNA Oligomer
aggauaggaaauuaguucu

SEQ ID NO: 722 - RNA, 19 nt, artificial
  RNA Oligomer
ugugaggauaggaaauuag

SEQ ID NO: 723 - RNA, 19 nt, artificial
  RNA Oligomer
ccugugaggauaggaaauu

SEQ ID NO: 724 - RNA, 19 nt, artificial
  RNA Oligomer
cugauauuuuuguguguag

SEQ ID NO: 725 - RNA, 19 nt, artificial
  RNA Oligomer
guucuuaaguguugaauac

SEQ ID NO: 726 - RNA, 19 nt, artificial
  RNA Oligomer
acugggauuauguuguucc

SEQ ID NO: 727 - RNA, 19 nt, artificial
  RNA Oligomer
ggugacuuccucacucuaa

SEQ ID NO: 728 - RNA, 19 nt, artificial
  RNA Oligomer
uuggugacuuccucacucu

SEQ ID NO: 729 - RNA, 19 nt, artificial
  RNA Oligomer
cacuguuucuuggugacuu

SEQ ID NO: 730 - RNA, 19 nt, artificial
  RNA Oligomer
cuucacuguuucuugguga

SEQ ID NO: 731 - RNA, 19 nt, artificial
  RNA Oligomer
uauuacggcaauaauggaa

SEQ ID NO: 732 - RNA, 19 nt, artificial
  RNA Oligomer
uagguaagaguaaaugaga

SEQ ID NO: 733 - RNA, 19 nt, artificial
  RNA Oligomer
cccuagguaagaguaaaug

SEQ ID NO: 734 - RNA, 19 nt, artificial
  RNA Oligomer
uuagacaggaagguaggau

SEQ ID NO: 735 - RNA, 19 nt, artificial
  RNA Oligomer
cuaagugauuuugacuacu

SEQ ID NO: 736 - RNA, 19 nt, artificial
  RNA Oligomer
agaagcccauuugaguuuu

SEQ ID NO: 737 - RNA, 19 nt, artificial
  RNA Oligomer
guagaagcccauuugaguu

SEQ ID NO: 738 - RNA, 19 nt, artificial
  RNA Oligomer
aaguagaagcccauuugag

SEQ ID NO: 739 - RNA, 19 nt, artificial
  RNA Oligomer
caaaaguagaagcccauuu

SEQ ID NO: 740 - RNA, 19 nt, artificial
  RNA Oligomer
agccugcuaagugauuuug

SEQ ID NO: 741 - RNA, 19 nt, artificial
  RNA Oligomer
gguaagcaaaaguagaagc

SEQ ID NO: 742 - RNA, 19 nt, artificial
  RNA Oligomer
agguaagcaaaaguagaag

SEQ ID NO: 743 - RNA, 19 nt, artificial
  RNA Oligomer
uggaauagguaagcaaaag

SEQ ID NO: 744 - RNA, 19 nt, artificial
  RNA Oligomer
auggaauagguaagcaaaa

SEQ ID NO: 745 - RNA, 19 nt, artificial
  RNA Oligomer
uugaaugggauggaauagg

SEQ ID NO: 746 - RNA, 19 nt, artificial
  RNA Oligomer
agagccugcuaagugauuu

SEQ ID NO: 747 - RNA, 19 nt, artificial
  RNA Oligomer
ucugcauagaucccauuuu

SEQ ID NO: 748 - RNA, 19 nt, artificial
  RNA Oligomer
uucuggccuuuggagaagu

SEQ ID NO: 749 - RNA, 19 nt, artificial
  RNA Oligomer
uuucuguguuucacauuca

SEQ ID NO: 750 - RNA, 19 nt, artificial
  RNA Oligomer
guagucucuuuucuuucug

SEQ ID NO: 751 - RNA, 19 nt, artificial
  RNA Oligomer
gaaaccccaaauguagucu

SEQ ID NO: 752 - RNA, 19 nt, artificial
  RNA Oligomer
guaguaaaacuauucagcu

SEQ ID NO: 753 - RNA, 19 nt, artificial
  RNA Oligomer
gguaguaaaacuauucagc

SEQ ID NO: 754 - RNA, 19 nt, artificial
  RNA Oligomer
gauuggaacaacagugauu

SEQ ID NO: 755 - RNA, 19 nt, artificial
  RNA Oligomer
uacucacugauuggaacaa

SEQ ID NO: 756 - RNA, 19 nt, artificial
  RNA Oligomer
gauuucgacuuguuaagaa

SEQ ID NO: 757 - RNA, 19 nt, artificial
  RNA Oligomer
aggauuucgacuuguuaag

SEQ ID NO: 758 - RNA, 19 nt, artificial
  RNA Oligomer
ucaggagaacucugauccu

SEQ ID NO: 759 - RNA, 19 nt, artificial
  RNA Oligomer
ggacuagcuucagggacuu

SEQ ID NO: 760 - RNA, 19 nt, artificial
  RNA Oligomer
cucauggacuagcuucagg

SEQ ID NO: 761 - RNA, 19 nt, artificial
  RNA Oligomer
gagaacugcucauggacua

SEQ ID NO: 762 - RNA, 19 nt, artificial
  RNA Oligomer
ggagaacugcucauggacu

SEQ ID NO: 763 - RNA, 19 nt, artificial
  RNA Oligomer
caggagaacugcucaugga

SEQ ID NO: 764 - RNA, 19 nt, artificial
  RNA Oligomer
gcuuacacuuguguuuaag

SEQ ID NO: 765 - RNA, 19 nt, artificial
  RNA Oligomer
ggauugugugugauucuag

SEQ ID NO: 766 - RNA, 19 nt, artificial
  RNA Oligomer
ggauaggauugugugugau

SEQ ID NO: 767 - RNA, 19 nt, artificial
  RNA Oligomer
gguugcaacuggcaguuug

SEQ ID NO: 768 - RNA, 19 nt, artificial
  RNA Oligomer
uaaacuugguugcucaaag

SEQ ID NO: 769 - RNA, 19 nt, artificial
  RNA Oligomer
ggcuuauggaaggcuguua

SEQ ID NO: 770 - RNA, 19 nt, artificial
  RNA Oligomer
aaauggugauggcuuaugg

SEQ ID NO: 771 - RNA, 19 nt, artificial
  RNA Oligomer
ucucuugccuguuaugcuu

SEQ ID NO: 772 - RNA, 19 nt, artificial
  RNA Oligomer
uucuugggcaucgauguag

SEQ ID NO: 773 - RNA, 19 nt, artificial
  RNA Oligomer
aagcuccaaagguucacug

SEQ ID NO: 774 - RNA, 19 nt, artificial
  RNA Oligomer
ucuauuguuaagcuccaaa

SEQ ID NO: 775 - RNA, 19 nt, artificial
  RNA Oligomer
gggccaagauaaaucaaug

SEQ ID NO: 776 - RNA, 19 nt, artificial
  RNA Oligomer
uagaauugggccaagauaa

SEQ ID NO: 777 - RNA, 19 nt, artificial
  RNA Oligomer
ggaaagauacuacaaagcc

SEQ ID NO: 778 - RNA, 19 nt, artificial
  RNA Oligomer
ucaaaugcuuggaaagaua

SEQ ID NO: 779 - RNA, 19 nt, artificial
  RNA Oligomer
guuacugaaaaacaggugu

SEQ ID NO: 780 - RNA, 19 nt, artificial
  RNA Oligomer
auguauucauccugguguu

SEQ ID NO: 781 - RNA, 19 nt, artificial
  RNA Oligomer
cagauguauucauccuggu

SEQ ID NO: 782 - RNA, 19 nt, artificial
  RNA Oligomer
ugcccuagcuauuagcucc

SEQ ID NO: 783 - RNA, 19 nt, artificial
  RNA Oligomer
gagcuuauucagguuuccu

SEQ ID NO: 784 - RNA, 19 nt, artificial
  RNA Oligomer
ggagcuuauucagguuucc

SEQ ID NO: 785 - RNA, 19 nt, artificial
  RNA Oligomer
ucauauccuugcugugggu

SEQ ID NO: 786 - RNA, 19 nt, artificial
  RNA Oligomer
guucaauucagcaaggcuu

SEQ ID NO: 787 - RNA, 19 nt, artificial
  RNA Oligomer
caacaauguucaauucagc

SEQ ID NO: 788 - RNA, 19 nt, artificial
  RNA Oligomer
gucuuauuccaacuaagua

SEQ ID NO: 789 - RNA, 19 nt, artificial
  RNA Oligomer
cuagggaauaauaaaggcc

SEQ ID NO: 790 - RNA, 19 nt, artificial
  RNA Oligomer
uaaccaugcaugcacccag

SEQ ID NO: 791 - RNA, 19 nt, artificial
  RNA Oligomer
agauaaccaugcaugcacc

SEQ ID NO: 792 - RNA, 19 nt, artificial
  RNA Oligomer
agccuagagaaugaaacuc

SEQ ID NO: 793 - RNA, 19 nt, artificial
  RNA Oligomer
uuauaguacagccuagaga

SEQ ID NO: 794 - RNA, 19 nt, artificial
  RNA Oligomer
gcuauggagauaugguuua

SEQ ID NO: 795 - RNA, 19 nt, artificial
  RNA Oligomer
ucucuccuuaaccccaauu

SEQ ID NO: 796 - RNA, 19 nt, artificial
  RNA Oligomer
aucucuccuuaaccccaau

SEQ ID NO: 797 - RNA, 19 nt, artificial
  RNA Oligomer
cugggcuuuucugggaauu

SEQ ID NO: 798 - RNA, 19 nt, artificial
  RNA Oligomer
aaccauuucaccauggcag

SEQ ID NO: 799 - RNA, 19 nt, artificial
  RNA Oligomer
uucaguauuacaugugcuu

SEQ ID NO: 800 - RNA, 19 nt, artificial
  RNA Oligomer
uccucuuuucaguauuaca

SEQ ID NO: 801 - RNA, 19 nt, artificial
  RNA Oligomer
auccucuuuucaguauuac

SEQ ID NO: 802 - RNA, 19 nt, artificial
  RNA Oligomer
cuauccucuuuucaguauu

SEQ ID NO: 803 - RNA, 19 nt, artificial
  RNA Oligomer
aaucuauccucuuuucagu

SEQ ID NO: 804 - RNA, 19 nt, artificial
  RNA Oligomer
uucacuuaguaaucuaucc

SEQ ID NO: 805 - RNA, 19 nt, artificial
  RNA Oligomer
uaggaaauuaguucugaga

SEQ ID NO: 806 - RNA, 19 nt, artificial
  RNA Oligomer
ggauaggaaauuaguucug

SEQ ID NO: 807 - RNA, 19 nt, artificial
  RNA Oligomer
gaggauaggaaauuaguuc

SEQ ID NO: 808 - RNA, 19 nt, artificial
  RNA Oligomer
gugaggauaggaaauuagu

SEQ ID NO: 809 - RNA, 19 nt, artificial
  RNA Oligomer
guaggcuugguaauagacu

SEQ ID NO: 810 - RNA, 19 nt, artificial
  RNA Oligomer
ccugcuaagugauuuugac

SEQ ID NO: 811 - RNA, 19 nt, artificial
  RNA Oligomer
ugcauagaucccauuuuug

SEQ ID NO: 812 - RNA, 19 nt, artificial
  RNA Oligomer
uucuuucuguguuucacau

SEQ ID NO: 813 - RNA, 19 nt, artificial
  RNA Oligomer
caaauguagucucuuuucu

SEQ ID NO: 814 - RNA, 19 nt, artificial
  RNA Oligomer
aaaccccaaauguagucuc

SEQ ID NO: 815 - RNA, 19 nt, artificial
  RNA Oligomer
ugcccuaaauaagaaaccc

SEQ ID NO: 816 - RNA, 19 nt, artificial
  RNA Oligomer
aaacuauucagcuagucag

SEQ ID NO: 817 - RNA, 19 nt, artificial
  RNA Oligomer
gugauugaaggguccuaaa

SEQ ID NO: 818 - RNA, 19 nt, artificial
  RNA Oligomer
ucaggauuucgacuuguua

SEQ ID NO: 819 - RNA, 19 nt, artificial
  RNA Oligomer
uagaggucgcuucuccucu

SEQ ID NO: 820 - RNA, 19 nt, artificial
  RNA Oligomer
aacugcucauggacuagcu

SEQ ID NO: 821 - RNA, 19 nt, artificial
  RNA Oligomer
ggugauggcuuauggaagg

SEQ ID NO: 822 - RNA, 19 nt, artificial
  RNA Oligomer
aggcuucuugggcaucgau

SEQ ID NO: 823 - RNA, 19 nt, artificial
  RNA Oligomer
uaagcuccaaagguucacu

SEQ ID NO: 824 - RNA, 19 nt, artificial
  RNA Oligomer
ggccaagauaaaucaaugu

SEQ ID NO: 825 - RNA, 19 nt, artificial
  RNA Oligomer
uucaaaugcuuggaaagau

SEQ ID NO: 826 - RNA, 19 nt, artificial
  RNA Oligomer
gggacagauguauucaucc

SEQ ID NO: 827 - RNA, 19 nt, artificial
  RNA Oligomer
agcuuauucagguuuccug

SEQ ID NO: 828 - RNA, 19 nt, artificial
  RNA Oligomer
auuccaacuaaguagauca

SEQ ID NO: 829 - RNA, 19 nt, artificial
  RNA Oligomer
aguacagccuagagaauga

SEQ ID NO: 830 - RNA, 19 nt, artificial
  RNA Oligomer
auaguacagccuagagaau

SEQ ID NO: 831 - RNA, 19 nt, artificial
  RNA Oligomer
gguuuauaguacagccuag

SEQ ID NO: 832 - RNA, 19 nt, artificial
  RNA Oligomer
gauaugguuuauaguacag

SEQ ID NO: 833 - RNA, 19 nt, artificial
  RNA Oligomer
ggagauaugguuuauagua

SEQ ID NO: 834 - RNA, 19 nt, artificial
  RNA Oligomer
aaccccaauugucaagggu

SEQ ID NO: 835 - RNA, 19 nt, artificial
  RNA Oligomer
uaucucuccuuaaccccaa

SEQ ID NO: 836 - RNA, 19 nt, artificial
  RNA Oligomer
guaucucuccuuaacccca

SEQ ID NO: 837 - RNA, 19 nt, artificial
  RNA Oligomer
ucugggcuuuucugggaau

SEQ ID NO: 838 - RNA, 19 nt, artificial
  RNA Oligomer
gaaccauuucaccauggca

SEQ ID NO: 839 - RNA, 19 nt, artificial
  RNA Oligomer
ucuauccucuuuucaguau

SEQ ID NO: 840 - RNA, 19 nt, artificial
  RNA Oligomer
uguguguaguugauuacuc

SEQ ID NO: 841 - RNA, 19 nt, artificial
  RNA Oligomer
cuuaaguguugaauacugu

SEQ ID NO: 842 - RNA, 19 nt, artificial
  RNA Oligomer
ucuuaaguguugaauacug

SEQ ID NO: 843 - RNA, 19 nt, artificial
  RNA Oligomer
aaaccagauuugccuauuu

SEQ ID NO: 844 - RNA, 19 nt, artificial
  RNA Oligomer
ccuuuggagaagugauuca

SEQ ID NO: 845 - RNA, 19 nt, artificial
  RNA Oligomer
uggccuuuggagaagugau

SEQ ID NO: 846 - RNA, 19 nt, artificial
  RNA Oligomer
uguagucucuuuucuuucu

SEQ ID NO: 847 - RNA, 19 nt, artificial
  RNA Oligomer
cuaaauaagaaaccccaaa

SEQ ID NO: 848 - RNA, 19 nt, artificial
  RNA Oligomer
ccugcccuaaauaagaaac

SEQ ID NO: 849 - RNA, 19 nt, artificial
  RNA Oligomer
aaacuuuacucacugauug

SEQ ID NO: 850 - RNA, 19 nt, artificial
  RNA Oligomer
gaaaaaacuuuacucacug

SEQ ID NO: 851 - RNA, 19 nt, artificial
  RNA Oligomer
ggauuucgacuuguuaaga

SEQ ID NO: 852 - RNA, 19 nt, artificial
  RNA Oligomer
caggauuucgacuuguuaa

SEQ ID NO: 853 - RNA, 19 nt, artificial
  RNA Oligomer
cuggcaguuugagcagcaa

SEQ ID NO: 854 - RNA, 19 nt, artificial
  RNA Oligomer
acuggcaguuugagcagca

SEQ ID NO: 855 - RNA, 19 nt, artificial
  RNA Oligomer
uaggauugugugugauucu

SEQ ID NO: 856 - RNA, 19 nt, artificial
  RNA Oligomer
cuggauaggauugugugug

SEQ ID NO: 857 - RNA, 19 nt, artificial
  RNA Oligomer
caaagguccuugucccuga

SEQ ID NO: 858 - RNA, 19 nt, artificial
  RNA Oligomer
guugcucaaagguccuugu

SEQ ID NO: 859 - RNA, 19 nt, artificial
  RNA Oligomer
aaacuugguugcucaaagg

SEQ ID NO: 860 - RNA, 19 nt, artificial
  RNA Oligomer
uggugauggcuuauggaag

SEQ ID NO: 861 - RNA, 19 nt, artificial
  RNA Oligomer
ggaguugucaccacugacu

SEQ ID NO: 862 - RNA, 19 nt, artificial
  RNA Oligomer
acaauguucaauucagcaa

SEQ ID NO: 863 - RNA, 19 nt, artificial
  RNA Oligomer
ugaggaaucaacuugccag

SEQ ID NO: 864 - RNA, 19 nt, artificial
  RNA Oligomer
uggagauaugguuuauagu

SEQ ID NO: 865 - RNA, 19 nt, artificial
  RNA Oligomer
cuauggagauaugguuuau

SEQ ID NO: 866 - RNA, 19 nt, artificial
  RNA Oligomer
ccccaauugucaaggguag

SEQ ID NO: 867 - RNA, 19 nt, artificial
  RNA Oligomer
uaaccccaauugucaaggg

SEQ ID NO: 868 - RNA, 19 nt, artificial
  RNA Oligomer
acuuaguaaucuauccucu

SEQ ID NO: 869 - RNA, 19 nt, artificial
  RNA Oligomer
cacuuaguaaucuauccuc

SEQ ID NO: 870 - RNA, 19 nt, artificial
  RNA Oligomer
aggaaauuaguucugagau

SEQ ID NO: 871 - RNA, 19 nt, artificial
  RNA Oligomer
uggugacuuccucacucua

SEQ ID NO: 872 - RNA, 19 nt, artificial
  RNA Oligomer
guuucagguaggcuuggua

SEQ ID NO: 873 - RNA, 19 nt, artificial
  RNA Oligomer
auagguaagcaaaaguaga

SEQ ID NO: 874 - RNA, 19 nt, artificial
  RNA Oligomer
acaacagugauugaagggu

SEQ ID NO: 875 - RNA, 19 nt, artificial
  RNA Oligomer
gaacugcucauggacuagc

SEQ ID NO: 876 - RNA, 19 nt, artificial
  RNA Oligomer
guguuuaagcaggagaacu

SEQ ID NO: 877 - RNA, 19 nt, artificial
  RNA Oligomer
gagaaacugacccagagaa

SEQ ID NO: 878 - RNA, 19 nt, artificial
  RNA Oligomer
caauguucaauucagcaag

SEQ ID NO: 879 - RNA, 19 nt, artificial
  RNA Oligomer
ggcuauggagauaugguuu

SEQ ID NO: 880 - RNA, 19 nt, artificial
  RNA Oligomer
auaggaaauuaguucugag

SEQ ID NO: 881 - RNA, 19 nt, artificial
  RNA Oligomer
gauaggaaauuaguucuga

SEQ ID NO: 882 - RNA, 19 nt, artificial
  RNA Oligomer
auaaaccagauuugccuau

SEQ ID NO: 883 - RNA, 19 nt, artificial
  RNA Oligomer
caacagugauugaaggguc

SEQ ID NO: 884 - RNA, 19 nt, artificial
  RNA Oligomer
ugguugcucaaagguccuu

SEQ ID NO: 885 - RNA, 19 nt, artificial
  RNA Oligomer
uugguugcucaaagguccu

SEQ ID NO: 886 - RNA, 19 nt, artificial
  RNA Oligomer
augcuuacaaaauggugau

SEQ ID NO: 887 - RNA, 19 nt, artificial
  RNA Oligomer
cuggaguugucaccacuga

SEQ ID NO: 888 - RNA, 19 nt, artificial
  RNA Oligomer
cuccaaagguucacugugu

SEQ ID NO: 889 - RNA, 19 nt, artificial
  RNA Oligomer
gagguaauauuugaggaau

SEQ ID NO: 890 - RNA, 19 nt, artificial
  RNA Oligomer
acgagguaauauuugagga

SEQ ID NO: 891 - RNA, 19 nt, artificial
  RNA Oligomer
guuccugacucaaauuuga

SEQ ID NO: 892 - RNA, 19 nt, artificial
  RNA Oligomer
cugauccucagcucaggau

SEQ ID NO: 893 - RNA, 19 nt, artificial
  RNA Oligomer
agguaauauuugaggaauc

SEQ ID NO: 894 - RNA, 19 nt, artificial
  RNA Oligomer
cgagguaauauuugaggaa

SEQ ID NO: 895 - RNA, 19 nt, artificial
  RNA Oligomer
aucaaaacuuccaaaagcc

SEQ ID NO: 896 - RNA, 19 nt, artificial
  RNA Oligomer
uaucaaaacuuccaaaagc

SEQ ID NO: 897 - RNA, 19 nt, artificial
  RNA Oligomer
cugauuuucuggccuuugg

SEQ ID NO: 898 - RNA, 19 nt, artificial
  RNA Oligomer
cacuuguguuuaagcagga

SEQ ID NO: 899 - RNA, 19 nt, artificial
  RNA Oligomer
uaugcuuacaaaaugguga

SEQ ID NO: 900 - RNA, 19 nt, artificial
  RNA Oligomer
gaauugaaguaucucuccu

SEQ ID NO: 901 - RNA, 19 nt, artificial
  RNA Oligomer
uuccugacucaaauuugaa

SEQ ID NO: 902 - RNA, 19 nt, artificial
  RNA Oligomer
uucucuaaguuuucagagg

SEQ ID NO: 903 - RNA, 19 nt, artificial
  RNA Oligomer
ugaaugggauggaauaggu

SEQ ID NO: 904 - RNA, 19 nt, artificial
  RNA Oligomer
gaagugauucaaaauagug

SEQ ID NO: 905 - RNA, 19 nt, artificial
  RNA Oligomer
uugaaggguccuaaaaagg

SEQ ID NO: 906 - RNA, 19 nt, artificial
  RNA Oligomer
cgacuuguuaagaaaaaac

SEQ ID NO: 907 - RNA, 19 nt, artificial
  RNA Oligomer
uuguguuuaagcaggagaa

SEQ ID NO: 908 - RNA, 19 nt, artificial
  RNA Oligomer
acacuuguguuuaagcagg

SEQ ID NO: 909 - RNA, 19 nt, artificial
  RNA Oligomer
uuacacuuguguuuaagca

SEQ ID NO: 910 - RNA, 19 nt, artificial
  RNA Oligomer
agaaacugacccagagaau

SEQ ID NO: 911 - RNA, 19 nt, artificial
  RNA Oligomer
ccauggcaguguuaucuca

SEQ ID NO: 912 - RNA, 19 nt, artificial
  RNA Oligomer
auugaaggguccuaaaaag

SEQ ID NO: 913 - RNA, 19 nt, artificial
  RNA Oligomer
uggaacaacagugauugaa

SEQ ID NO: 914 - RNA, 19 nt, artificial
  RNA Oligomer
gcaacuggcaguuugagca

SEQ ID NO: 915 - RNA, 19 nt, artificial
  RNA Oligomer
gguaauauuugaggaauca

SEQ ID NO: 916 - RNA, 19 nt, artificial
  RNA Oligomer
cugagaaacugacccagag

SEQ ID NO: 917 - RNA, 19 nt, artificial
  RNA Oligomer
cucugggcuuuucugggaa

SEQ ID NO: 918 - RNA, 19 nt, artificial
  RNA Oligomer
uuggaacaacagugauuga

SEQ ID NO: 919 - RNA, 19 nt, artificial
  RNA Oligomer
ugauggcuuauggaaggcu

SEQ ID NO: 920 - RNA, 19 nt, artificial
  RNA Oligomer
gugauggcuuauggaaggc

SEQ ID NO: 921 - RNA, 19 nt, artificial
  RNA Oligomer
uuggcuauggagauauggu

SEQ ID NO: 922 - RNA, 19 nt, artificial
  RNA Oligomer
cucuuuucuuucuguguuu

SEQ ID NO: 923 - RNA, 19 nt, artificial
  RNA Oligomer
ggaacaacagugauugaag

SEQ ID NO: 924 - RNA, 19 nt, artificial
  RNA Oligomer
ucucugggcuuuucuggga

SEQ ID NO: 925 - RNA, 19 nt, artificial
  RNA Oligomer
ucucuuuucuuucuguguu

SEQ ID NO: 926 - RNA, 19 nt, artificial
  RNA Oligomer
gucucuuuucuuucugugu

SEQ ID NO: 927 - RNA, 19 nt, artificial
  RNA Oligomer
aguuuguuagaacacuggc

SEQ ID NO: 928 - RNA, 19 nt, artificial
  RNA Oligomer
uuuguuagaacacuggcua

SEQ ID NO: 929 - RNA, 19 nt, artificial
  RNA Oligomer
auuagagugaggaagucac

SEQ ID NO: 930 - RNA, 19 nt, artificial
  RNA Oligomer
guuuguuagaacacuggcu

SEQ ID NO: 931 - RNA, 19 nt, artificial
  RNA Oligomer
agguauucaucauucacuc

SEQ ID NO: 932 - RNA, 19 nt, artificial
  RNA Oligomer
acauuagagugaggaaguc

SEQ ID NO: 933 - RNA, 19 nt, artificial
  RNA Oligomer
gaguuuaguuuguuagaac

SEQ ID NO: 934 - RNA, 19 nt, artificial
  RNA Oligomer
ucacagguauucaucauuc

SEQ ID NO: 935 - RNA, 19 nt, artificial
  RNA Oligomer
uaaaacauuagagugagga

SEQ ID NO: 936 - RNA, 19 nt, artificial
  RNA Oligomer
auuuuaaccaaauucuggc

SEQ ID NO: 937 - RNA, 19 nt, artificial
  RNA Oligomer
acuucguaaauugacccgu

SEQ ID NO: 938 - RNA, 19 nt, artificial
  RNA Oligomer
ucaucauucacucaaugga

SEQ ID NO: 939 - RNA, 19 nt, artificial
  RNA Oligomer
aaaacauuagagugaggaa

SEQ ID NO: 940 - RNA, 19 nt, artificial
  RNA Oligomer
guggaaaaaaucugggugc

SEQ ID NO: 941 - RNA, 19 nt, artificial
  RNA Oligomer
guuacugaaauggcaccac

SEQ ID NO: 942 - RNA, 19 nt, artificial
  RNA Oligomer
uuaaaacauuagagugagg

SEQ ID NO: 943 - RNA, 19 nt, artificial
  RNA Oligomer
aaacauuagagugaggaag

SEQ ID NO: 944 - RNA, 19 nt, artificial
  RNA Oligomer
acuuagagaaaaaaaagcc

SEQ ID NO: 945 - RNA, 19 nt, artificial
  RNA Oligomer
auucuguacaaaaauggga

SEQ ID NO: 946 - RNA, 19 nt, artificial
  RNA Oligomer
cuauuuugaaucacuucuc

SEQ ID NO: 947 - RNA, 19 nt, artificial
  RNA Oligomer
uauuuugaaucacuucucc

SEQ ID NO: 948 - RNA, 19 nt, artificial
  RNA Oligomer
acaaaugacuuuagcugac

SEQ ID NO: 949 - RNA, 19 nt, artificial
  RNA Oligomer
auucugaaaugcuggccgg

SEQ ID NO: 950 - RNA, 19 nt, artificial
  RNA Oligomer
acagacaguucuccagcau

SEQ ID NO: 951 - RNA, 19 nt, artificial
  RNA Oligomer
agacaguucuccagcauuu

SEQ ID NO: 952 - RNA, 19 nt, artificial
  RNA Oligomer
uucuccagcauuuuaacca

SEQ ID NO: 953 - RNA, 19 nt, artificial
  RNA Oligomer
ucuccagcauuuuaaccaa

SEQ ID NO: 954 - RNA, 19 nt, artificial
  RNA Oligomer
agcaugugaaguggagcua

SEQ ID NO: 955 - RNA, 19 nt, artificial
  RNA Oligomer
acauuguugaguggaggcu

SEQ ID NO: 956 - RNA, 19 nt, artificial
  RNA Oligomer
agguggaaaaaaucugggu

SEQ ID NO: 957 - RNA, 19 nt, artificial
  RNA Oligomer
uggaaaaaaucugggugca

SEQ ID NO: 958 - RNA, 19 nt, artificial
  RNA Oligomer
uucguaaauugacccguuu

SEQ ID NO: 959 - RNA, 19 nt, artificial
  RNA Oligomer
ccucacagguauucaucau

SEQ ID NO: 960 - RNA, 19 nt, artificial
  RNA Oligomer
guauucaucauucacucaa

SEQ ID NO: 961 - RNA, 19 nt, artificial
  RNA Oligomer
agcaguuccauuauugccg

SEQ ID NO: 962 - RNA, 19 nt, artificial
  RNA Oligomer
uuuggaaguuuugauaggc

SEQ ID NO: 963 - RNA, 19 nt, artificial
  RNA Oligomer
cuuagagaaaaaaaagcca

SEQ ID NO: 964 - RNA, 19 nt, artificial
  RNA Oligomer
auguaaaacucaaaugggc

SEQ ID NO: 965 - RNA, 19 nt, artificial
  RNA Oligomer
caauucugaaaugcuggcc

SEQ ID NO: 966 - RNA, 19 nt, artificial
  RNA Oligomer
aauucugaaaugcuggccg

SEQ ID NO: 967 - RNA, 19 nt, artificial
  RNA Oligomer
ucaaaaguagguacgacgc

SEQ ID NO: 968 - RNA, 19 nt, artificial
  RNA Oligomer
aaaaguagguacgacgcua

SEQ ID NO: 969 - RNA, 19 nt, artificial
  RNA Oligomer
uuuccaaguucacgugcau

SEQ ID NO: 970 - RNA, 19 nt, artificial
  RNA Oligomer
guuaguggaaaaaggacaa

SEQ ID NO: 971 - RNA, 19 nt, artificial
  RNA Oligomer
uuaguggaaaaaggacaac

SEQ ID NO: 972 - RNA, 19 nt, artificial
  RNA Oligomer
aguggaaaaaggacaacag

SEQ ID NO: 973 - RNA, 19 nt, artificial
  RNA Oligomer
uggacagacaguucuccag

SEQ ID NO: 974 - RNA, 19 nt, artificial
  RNA Oligomer
caauucuauaaagauuggc

SEQ ID NO: 975 - RNA, 19 nt, artificial
  RNA Oligomer
aacacuggcuaauuugaac

SEQ ID NO: 976 - RNA, 19 nt, artificial
  RNA Oligomer
uuuuaaccaaauucuggca

SEQ ID NO: 977 - RNA, 19 nt, artificial
  RNA Oligomer
aagguggaaaaaaucuggg

SEQ ID NO: 978 - RNA, 19 nt, artificial
  RNA Oligomer
gguggaaaaaaucugggug

SEQ ID NO: 979 - RNA, 19 nt, artificial
  RNA Oligomer
augcagacuucguaaauug

SEQ ID NO: 980 - RNA, 19 nt, artificial
  RNA Oligomer
agacuucguaaauugaccc

SEQ ID NO: 981 - RNA, 19 nt, artificial
  RNA Oligomer
cuucguaaauugacccguu

SEQ ID NO: 982 - RNA, 19 nt, artificial
  RNA Oligomer
cguaaauugacccguuuca

SEQ ID NO: 983 - RNA, 19 nt, artificial
  RNA Oligomer
gguuacugaaauggcacca

SEQ ID NO: 984 - RNA, 19 nt, artificial
  RNA Oligomer
aaacagugaagcaguucca

SEQ ID NO: 985 - RNA, 19 nt, artificial
  RNA Oligomer
accuacuuaauccuaccuu

SEQ ID NO: 986 - RNA, 19 nt, artificial
  RNA Oligomer
acuuaauccuaccuuccug

SEQ ID NO: 987 - RNA, 19 nt, artificial
  RNA Oligomer
uuggaaguuuugauaggcu

SEQ ID NO: 988 - RNA, 19 nt, artificial
  RNA Oligomer
aaaauaggcaaaucugguu

SEQ ID NO: 989 - RNA, 19 nt, artificial
  RNA Oligomer
aucccauucaauucuguac

SEQ ID NO: 990 - RNA, 19 nt, artificial
  RNA Oligomer
uucuguacaaaaaugggau

SEQ ID NO: 991 - RNA, 19 nt, artificial
  RNA Oligomer
cuacaaaugacuuuagcug

SEQ ID NO: 992 - RNA, 19 nt, artificial
  RNA Oligomer
aguuuuacuacccaaucau

SEQ ID NO: 993 - RNA, 19 nt, artificial
  RNA Oligomer
uuucccuuuuuaggacccu

SEQ ID NO: 994 - RNA, 19 nt, artificial
  RNA Oligomer
ucaauuuccaaguucacgu

SEQ ID NO: 995 - RNA, 19 nt, artificial
  RNA Oligomer
aggacaucuugagcaauuc

SEQ ID NO: 996 - RNA, 19 nt, artificial
  RNA Oligomer
gacaucuugagcaauucuc

SEQ ID NO: 997 - RNA, 19 nt, artificial
  RNA Oligomer
acaucuugagcaauucucu

SEQ ID NO: 998 - RNA, 19 nt, artificial
  RNA Oligomer
aucuugagcaauucucugg

SEQ ID NO: 999 - RNA, 19 nt, artificial
  RNA Oligomer
ucuugagcaauucucuggg

SEQ ID NO: 1000 - RNA, 19 nt, artificial
  RNA Oligomer
uugauuuggacagacaguu

SEQ ID NO: 1001 - RNA, 19 nt, artificial
  RNA Oligomer
uguuaguggaaaaaggaca

SEQ ID NO: 1002 - RNA, 19 nt, artificial
  RNA Oligomer
ggaaaaaggacaacaguuc

SEQ ID NO: 1003 - RNA, 19 nt, artificial
  RNA Oligomer
uuuggacagacaguucucc

SEQ ID NO: 1004 - RNA, 19 nt, artificial
  RNA Oligomer
uuaguuuguuagaacacug

SEQ ID NO: 1005 - RNA, 19 nt, artificial
  RNA Oligomer
uuagaacacuggcuaauuu

SEQ ID NO: 1006 - RNA, 19 nt, artificial
  RNA Oligomer
aacagugacauuuuagguc

SEQ ID NO: 1007 - RNA, 19 nt, artificial
  RNA Oligomer
uuuaaccaaauucuggcaa

SEQ ID NO: 1008 - RNA, 19 nt, artificial
  RNA Oligomer
ugaauaagcuccuuaucca

SEQ ID NO: 1009 - RNA, 19 nt, artificial
  RNA Oligomer
aggauaugaaagccuugcu

SEQ ID NO: 1010 - RNA, 19 nt, artificial
  RNA Oligomer
ugaacauuguugaguggag

SEQ ID NO: 1011 - RNA, 19 nt, artificial
  RNA Oligomer
auuguugaguggaggcuaa

SEQ ID NO: 1012 - RNA, 19 nt, artificial
  RNA Oligomer
aguggaggcuaaauucucu

SEQ ID NO: 1013 - RNA, 19 nt, artificial
  RNA Oligomer
aggaaagagauaaugaucu

SEQ ID NO: 1014 - RNA, 19 nt, artificial
  RNA Oligomer
uaagacaaaaaauaaggcc

SEQ ID NO: 1015 - RNA, 19 nt, artificial
  RNA Oligomer
ccaagguggaaaaaaucug

SEQ ID NO: 1016 - RNA, 19 nt, artificial
  RNA Oligomer
caagguggaaaaaaucugg

SEQ ID NO: 1017 - RNA, 19 nt, artificial
  RNA Oligomer
ugaguuucauucucuaggc

SEQ ID NO: 1018 - RNA, 19 nt, artificial
  RNA Oligomer
agccaaugcagacuucgua

SEQ ID NO: 1019 - RNA, 19 nt, artificial
  RNA Oligomer
gacuucguaaauugacccg

SEQ ID NO: 1020 - RNA, 19 nt, artificial
  RNA Oligomer
ucguaaauugacccguuuc

SEQ ID NO: 1021 - RNA, 19 nt, artificial
  RNA Oligomer
aagugaaucagagagggac

SEQ ID NO: 1022 - RNA, 19 nt, artificial
  RNA Oligomer
uucuuaggaguccccucuc

SEQ ID NO: 1023 - RNA, 19 nt, artificial
  RNA Oligomer
ccuacuuaauccuaccuuc

SEQ ID NO: 1024 - RNA, 19 nt, artificial
  RNA Oligomer
uggaaguuuugauaggcua

SEQ ID NO: 1025 - RNA, 19 nt, artificial
  RNA Oligomer
caauucuguacaaaaaugg

SEQ ID NO: 1026 - RNA, 19 nt, artificial
  RNA Oligomer
uguacaaaaaugggaucua

SEQ ID NO: 1027 - RNA, 19 nt, artificial
  RNA Oligomer
aaaucagccuguuagcugc

SEQ ID NO: 1028 - RNA, 19 nt, artificial
  RNA Oligomer
ugcuaugaaugugaaacac

SEQ ID NO: 1029 - RNA, 19 nt, artificial
  RNA Oligomer
uauuuucccuuuuuaggac

SEQ ID NO: 1030 - RNA, 19 nt, artificial
  RNA Oligomer
uuuucccuuuuuaggaccc

SEQ ID NO: 1031 - RNA, 19 nt, artificial
  RNA Oligomer
uucccuuuuuaggacccuu

SEQ ID NO: 1032 - RNA, 19 nt, artificial
  RNA Oligomer
acuaaagaaaaagucccug

SEQ ID NO: 1033 - RNA, 19 nt, artificial
  RNA Oligomer
auuuccaaguucacgugca

SEQ ID NO: 1034 - RNA, 19 nt, artificial
  RNA Oligomer
aaguucacgugcauaacac

SEQ ID NO: 1035 - RNA, 19 nt, artificial
  RNA Oligomer
uucacgugcauaacacaac

SEQ ID NO: 1036 - RNA, 19 nt, artificial
  RNA Oligomer
acgugcauaacacaaccuc

SEQ ID NO: 1037 - RNA, 19 nt, artificial
  RNA Oligomer
uugagcaauucucuggguc

SEQ ID NO: 1038 - RNA, 19 nt, artificial
  RNA Oligomer
aaccaaguuuaguuugcuu

SEQ ID NO: 1039 - RNA, 19 nt, artificial
  RNA Oligomer
uuaguuugcuuugauuugg

SEQ ID NO: 1040 - RNA, 19 nt, artificial
  RNA Oligomer
auuaauuuaacagccuucc

SEQ ID NO: 1041 - RNA, 19 nt, artificial
  RNA Oligomer
uuuguaagcauaacaggca

SEQ ID NO: 1042 - RNA, 19 nt, artificial
  RNA Oligomer
uuguaagcauaacaggcaa

SEQ ID NO: 1043 - RNA, 19 nt, artificial
  RNA Oligomer
auaacaggcaagagaguca

SEQ ID NO: 1044 - RNA, 19 nt, artificial
  RNA Oligomer
cuguuaguggaaaaaggac

SEQ ID NO: 1045 - RNA, 19 nt, artificial
  RNA Oligomer
aaaaaggacaacaguucua

SEQ ID NO: 1046 - RNA, 19 nt, artificial
  RNA Oligomer
aaaaggacaacaguucuac

SEQ ID NO: 1047 - RNA, 19 nt, artificial
  RNA Oligomer
auuuggacagacaguucuc

SEQ ID NO: 1048 - RNA, 19 nt, artificial
  RNA Oligomer
aacauugauuuaucuuggc

SEQ ID NO: 1049 - RNA, 19 nt, artificial
  RNA Oligomer
cuauaaagauuggcuuugu

SEQ ID NO: 1050 - RNA, 19 nt, artificial
  RNA Oligomer
cuaauuugaacagugacau

SEQ ID NO: 1051 - RNA, 19 nt, artificial
  RNA Oligomer
guaucaguaacaggaucac

SEQ ID NO: 1052 - RNA, 19 nt, artificial
  RNA Oligomer
cagcauuuuaaccaaauuc

SEQ ID NO: 1053 - RNA, 19 nt, artificial
  RNA Oligomer
agcaaggauaugaaagccu

SEQ ID NO: 1054 - RNA, 19 nt, artificial
  RNA Oligomer
ggauaugaaagccuugcug

SEQ ID NO: 1055 - RNA, 19 nt, artificial
  RNA Oligomer
aacauuguugaguggaggc

SEQ ID NO: 1056 - RNA, 19 nt, artificial
  RNA Oligomer
uugaguggaggcuaaauuc

SEQ ID NO: 1057 - RNA, 19 nt, artificial
  RNA Oligomer
guggaggcuaaauucucuc

SEQ ID NO: 1058 - RNA, 19 nt, artificial
  RNA Oligomer
ggaaagagauaaugaucua

SEQ ID NO: 1059 - RNA, 19 nt, artificial
  RNA Oligomer
aagacaaaaaauaaggccu

SEQ ID NO: 1060 - RNA, 19 nt, artificial
  RNA Oligomer
agacaaaaaauaaggccuu

SEQ ID NO: 1061 - RNA, 19 nt, artificial
  RNA Oligomer
aaaaaaucugggugcaugc

SEQ ID NO: 1062 - RNA, 19 nt, artificial
  RNA Oligomer
cagacuucguaaauugacc

SEQ ID NO: 1063 - RNA, 19 nt, artificial
  RNA Oligomer
ucaauucccagaaaagccc

SEQ ID NO: 1064 - RNA, 19 nt, artificial
  RNA Oligomer
uuccuauccucacagguau

SEQ ID NO: 1065 - RNA, 19 nt, artificial
  RNA Oligomer
auucacucaauggaagagu

SEQ ID NO: 1066 - RNA, 19 nt, artificial
  RNA Oligomer
ucaggaacaacauaauccc

SEQ ID NO: 1067 - RNA, 19 nt, artificial
  RNA Oligomer
cgugguuacugaaauggca

SEQ ID NO: 1068 - RNA, 19 nt, artificial
  RNA Oligomer
uuacugaaauggcaccaca

SEQ ID NO: 1069 - RNA, 19 nt, artificial
  RNA Oligomer
ugaaauggcaccacaagcu

SEQ ID NO: 1070 - RNA, 19 nt, artificial
  RNA Oligomer
ccucuuuaaaacauuagag

SEQ ID NO: 1071 - RNA, 19 nt, artificial
  RNA Oligomer
agaaacagugaagcaguuc

SEQ ID NO: 1072 - RNA, 19 nt, artificial
  RNA Oligomer
gaaacagugaagcaguucc

SEQ ID NO: 1073 - RNA, 19 nt, artificial
  RNA Oligomer
gcaguuccauuauugccgu

SEQ ID NO: 1074 - RNA, 19 nt, artificial
  RNA Oligomer
auuuacucuuaccuagggu

SEQ ID NO: 1075 - RNA, 19 nt, artificial
  RNA Oligomer
auccucugaaaacuuagag

SEQ ID NO: 1076 - RNA, 19 nt, artificial
  RNA Oligomer
auauagucuauuaccaagc

SEQ ID NO: 1077 - RNA, 19 nt, artificial
  RNA Oligomer
auagucuauuaccaagccu

SEQ ID NO: 1078 - RNA, 19 nt, artificial
  RNA Oligomer
ggaaucaaauguaaaacuc

SEQ ID NO: 1079 - RNA, 19 nt, artificial
  RNA Oligomer
uaaaacucaaaugggcuuc

SEQ ID NO: 1080 - RNA, 19 nt, artificial
  RNA Oligomer
aaaaucacuuagcaggcuc

SEQ ID NO: 1081 - RNA, 19 nt, artificial
  RNA Oligomer
ucccauucaauucuguaca

SEQ ID NO: 1082 - RNA, 19 nt, artificial
  RNA Oligomer
cccauucaauucuguacaa

SEQ ID NO: 1083 - RNA, 19 nt, artificial
  RNA Oligomer
cuacacuauuuugaaucac

SEQ ID NO: 1084 - RNA, 19 nt, artificial
  RNA Oligomer
uuuugaaucacuucuccaa

SEQ ID NO: 1085 - RNA, 19 nt, artificial
  RNA Oligomer
aggccagaaaaucagccug

SEQ ID NO: 1086 - RNA, 19 nt, artificial
  RNA Oligomer
agaaaaucagccuguuagc

SEQ ID NO: 1087 - RNA, 19 nt, artificial
  RNA Oligomer
aacuacaaaugacuuuagc

SEQ ID NO: 1088 - RNA, 19 nt, artificial
  RNA Oligomer
aaaugacuuuagcugacua

SEQ ID NO: 1089 - RNA, 19 nt, artificial
  RNA Oligomer
aaugacuuuagcugacuag

SEQ ID NO: 1090 - RNA, 19 nt, artificial
  RNA Oligomer
uaguuuuacuacccaauca

SEQ ID NO: 1091 - RNA, 19 nt, artificial
  RNA Oligomer
uccagcaauucugaaaugc

SEQ ID NO: 1092 - RNA, 19 nt, artificial
  RNA Oligomer
ucccuuuuuaggacccuuc

SEQ ID NO: 1093 - RNA, 19 nt, artificial
  RNA Oligomer
ucagaguucuccugaaacc

SEQ ID NO: 1094 - RNA, 19 nt, artificial
  RNA Oligomer
uucuccugaaaccagagga

SEQ ID NO: 1095 - RNA, 19 nt, artificial
  RNA Oligomer
uacuaaagaaaaagucccu

SEQ ID NO: 1096 - RNA, 19 nt, artificial
  RNA Oligomer
aguguaagcucaaaaguag

SEQ ID NO: 1097 - RNA, 19 nt, artificial
  RNA Oligomer
aaaguagguacgacgcuag

SEQ ID NO: 1098 - RNA, 19 nt, artificial
  RNA Oligomer
auccuauccagcuuuuuac

SEQ ID NO: 1099 - RNA, 19 nt, artificial
  RNA Oligomer
uccaaguucacgugcauaa

SEQ ID NO: 1100 - RNA, 19 nt, artificial
  RNA Oligomer
ucacgugcauaacacaacc

SEQ ID NO: 1101 - RNA, 19 nt, artificial
  RNA Oligomer
gugcauaacacaaccucgc

SEQ ID NO: 1102 - RNA, 19 nt, artificial
  RNA Oligomer
accaaguuuaguuugcuuu

SEQ ID NO: 1103 - RNA, 19 nt, artificial
  RNA Oligomer
cauuuuguaagcauaacag

SEQ ID NO: 1104 - RNA, 19 nt, artificial
  RNA Oligomer
acuguuaguggaaaaagga

SEQ ID NO: 1105 - RNA, 19 nt, artificial
  RNA Oligomer
cccaauucuauaaagauug

SEQ ID NO: 1106 - RNA, 19 nt, artificial
  RNA Oligomer
ccaauucuauaaagauugg

SEQ ID NO: 1107 - RNA, 19 nt, artificial
  RNA Oligomer
aagauuggcuuuguaguau

SEQ ID NO: 1108 - RNA, 19 nt, artificial
  RNA Oligomer
uaguuuguuagaacacugg

SEQ ID NO: 1109 - RNA, 19 nt, artificial
  RNA Oligomer
acuggcuaauuugaacagu

SEQ ID NO: 1110 - RNA, 19 nt, artificial
  RNA Oligomer
ugaacagugacauuuuagg

SEQ ID NO: 1111 - RNA, 19 nt, artificial
  RNA Oligomer
acagugacauuuuagguca

SEQ ID NO: 1112 - RNA, 19 nt, artificial
  RNA Oligomer
ugacauuuuaggucacuua

SEQ ID NO: 1113 - RNA, 19 nt, artificial
  RNA Oligomer
cauuuuaggucacuuauag

SEQ ID NO: 1114 - RNA, 19 nt, artificial
  RNA Oligomer
aucaguaacaggaucacac

SEQ ID NO: 1115 - RNA, 19 nt, artificial
  RNA Oligomer
ucuccagcaugugaagugg

SEQ ID NO: 1116 - RNA, 19 nt, artificial
  RNA Oligomer
cagcaaggauaugaaagcc

SEQ ID NO: 1117 - RNA, 19 nt, artificial
  RNA Oligomer
aaggauaugaaagccuugc

SEQ ID NO: 1118 - RNA, 19 nt, artificial
  RNA Oligomer
aauugaacauuguugagug

SEQ ID NO: 1119 - RNA, 19 nt, artificial
  RNA Oligomer
cauuguugaguggaggcua

SEQ ID NO: 1120 - RNA, 19 nt, artificial
  RNA Oligomer
gaaagagauaaugaucuac

SEQ ID NO: 1121 - RNA, 19 nt, artificial
  RNA Oligomer
ugacagguauccaaggugg

SEQ ID NO: 1122 - RNA, 19 nt, artificial
  RNA Oligomer
aaaaucugggugcaugcau

SEQ ID NO: 1123 - RNA, 19 nt, artificial
  RNA Oligomer
guaaauugacccguuucaa

SEQ ID NO: 1124 - RNA, 19 nt, artificial
  RNA Oligomer
ucaaauauuaccucguuga

SEQ ID NO: 1125 - RNA, 19 nt, artificial
  RNA Oligomer
aauauuaccucguugaggu

SEQ ID NO: 1126 - RNA, 19 nt, artificial
  RNA Oligomer
auuaccucguugagguugg

SEQ ID NO: 1127 - RNA, 19 nt, artificial
  RNA Oligomer
uucaucugagauuaagcac

SEQ ID NO: 1128 - RNA, 19 nt, artificial
  RNA Oligomer
ugaaucagagagggacuag

SEQ ID NO: 1129 - RNA, 19 nt, artificial
  RNA Oligomer
uauccucacagguauucau

SEQ ID NO: 1130 - RNA, 19 nt, artificial
  RNA Oligomer
cuucuuaggaguccccucu

SEQ ID NO: 1131 - RNA, 19 nt, artificial
  RNA Oligomer
acucaauggaagaguaauc

SEQ ID NO: 1132 - RNA, 19 nt, artificial
  RNA Oligomer
cucaauggaagaguaauca

SEQ ID NO: 1133 - RNA, 19 nt, artificial
  RNA Oligomer
auggaagaguaaucaacua

SEQ ID NO: 1134 - RNA, 19 nt, artificial
  RNA Oligomer
uggaagaguaaucaacuac

SEQ ID NO: 1135 - RNA, 19 nt, artificial
  RNA Oligomer
uaaagacaguauucaacac

SEQ ID NO: 1136 - RNA, 19 nt, artificial
  RNA Oligomer
aacaggggaaacugagcuu

SEQ ID NO: 1137 - RNA, 19 nt, artificial
  RNA Oligomer
ucuaaaacaacaccguggu

SEQ ID NO: 1138 - RNA, 19 nt, artificial
  RNA Oligomer
gugguuacugaaauggcac

SEQ ID NO: 1139 - RNA, 19 nt, artificial
  RNA Oligomer
ugguuacugaaauggcacc

SEQ ID NO: 1140 - RNA, 19 nt, artificial
  RNA Oligomer
ccaagaaacagugaagcag

SEQ ID NO: 1141 - RNA, 19 nt, artificial
  RNA Oligomer
aagaaacagugaagcaguu

SEQ ID NO: 1142 - RNA, 19 nt, artificial
  RNA Oligomer
ugaagcaguuccauuauug

SEQ ID NO: 1143 - RNA, 19 nt, artificial
  RNA Oligomer
uucucauuuacucuuaccu

SEQ ID NO: 1144 - RNA, 19 nt, artificial
  RNA Oligomer
aaacucaccuacuuaaucc

SEQ ID NO: 1145 - RNA, 19 nt, artificial
  RNA Oligomer
aacccuucaaauuugaguc

SEQ ID NO: 1146 - RNA, 19 nt, artificial
  RNA Oligomer
aucaaaauaggcaaaucug

SEQ ID NO: 1147 - RNA, 19 nt, artificial
  RNA Oligomer
ucaaaauaggcaaaucugg

SEQ ID NO: 1148 - RNA, 19 nt, artificial
  RNA Oligomer
aggcaaaucugguuuauau

SEQ ID NO: 1149 - RNA, 19 nt, artificial
  RNA Oligomer
uauagucuauuaccaagcc

SEQ ID NO: 1150 - RNA, 19 nt, artificial
  RNA Oligomer
cugaaaccaaauuguggaa

SEQ ID NO: 1151 - RNA, 19 nt, artificial
  RNA Oligomer
accaaauuguggaaucaaa

SEQ ID NO: 1152 - RNA, 19 nt, artificial
  RNA Oligomer
acuuuugcuuaccuauucc

SEQ ID NO: 1153 - RNA, 19 nt, artificial
  RNA Oligomer
uccaucccauucaauucug

SEQ ID NO: 1154 - RNA, 19 nt, artificial
  RNA Oligomer
ucuguacaaaaaugggauc

SEQ ID NO: 1155 - RNA, 19 nt, artificial
  RNA Oligomer
cuguacaaaaaugggaucu

SEQ ID NO: 1156 - RNA, 19 nt, artificial
  RNA Oligomer
cuaugcagaaaaucuacac

SEQ ID NO: 1157 - RNA, 19 nt, artificial
  RNA Oligomer
aaggccagaaaaucagccu

SEQ ID NO: 1158 - RNA, 19 nt, artificial
  RNA Oligomer
ugcaguugcuaugaaugug

SEQ ID NO: 1159 - RNA, 19 nt, artificial
  RNA Oligomer
uuauuuagggcaggugggg

SEQ ID NO: 1160 - RNA, 19 nt, artificial
  RNA Oligomer
acuacaaaugacuuuagcu

SEQ ID NO: 1161 - RNA, 19 nt, artificial
  RNA Oligomer
uacaaaugacuuuagcuga

SEQ ID NO: 1162 - RNA, 19 nt, artificial
  RNA Oligomer
gacuuuagcugacuagcug

SEQ ID NO: 1163 - RNA, 19 nt, artificial
  RNA Oligomer
ugaauaguuuuacuaccca

SEQ ID NO: 1164 - RNA, 19 nt, artificial
  RNA Oligomer
acccaaucaugaaauaauc

SEQ ID NO: 1165 - RNA, 19 nt, artificial
  RNA Oligomer
auuuucccuuuuuaggacc

SEQ ID NO: 1166 - RNA, 19 nt, artificial
  RNA Oligomer
cagcaauucugaaaugcug

SEQ ID NO: 1167 - RNA, 19 nt, artificial
  RNA Oligomer
gcaauucugaaaugcuggc

SEQ ID NO: 1168 - RNA, 19 nt, artificial
  RNA Oligomer
agcugaggaucagaguucu

SEQ ID NO: 1169 - RNA, 19 nt, artificial
  RNA Oligomer
acaggcagguggcuucuua

SEQ ID NO: 1170 - RNA, 19 nt, artificial
  RNA Oligomer
ucuccugaaaccagaggag

SEQ ID NO: 1171 - RNA, 19 nt, artificial
  RNA Oligomer
cuacuaaagaaaaaguccc

SEQ ID NO: 1172 - RNA, 19 nt, artificial
  RNA Oligomer
uuaaacacaaguguaagcu

SEQ ID NO: 1173 - RNA, 19 nt, artificial
  RNA Oligomer
gcucaaaaguagguacgac

SEQ ID NO: 1174 - RNA, 19 nt, artificial
  RNA Oligomer
caaaaguagguacgacgcu

SEQ ID NO: 1175 - RNA, 19 nt, artificial
  RNA Oligomer
acacaauccuauccagcuu

SEQ ID NO: 1176 - RNA, 19 nt, artificial
  RNA Oligomer
gcauaacacaaccucgcaa

SEQ ID NO: 1177 - RNA, 19 nt, artificial
  RNA Oligomer
cgcaggacaucuugagcaa

SEQ ID NO: 1178 - RNA, 19 nt, artificial
  RNA Oligomer
cuugagcaauucucugggu

SEQ ID NO: 1179 - RNA, 19 nt, artificial
  RNA Oligomer
caaguuuaguuugcuuuga

SEQ ID NO: 1180 - RNA, 19 nt, artificial
  RNA Oligomer
uaguuugcuuugauuugga

SEQ ID NO: 1181 - RNA, 19 nt, artificial
  RNA Oligomer
uaauuuaacagccuuccau

SEQ ID NO: 1182 - RNA, 19 nt, artificial
  RNA Oligomer
uuugcuuugauuuggacag

SEQ ID NO: 1183 - RNA, 19 nt, artificial
  RNA Oligomer
ugcuuugauuuggacagac

SEQ ID NO: 1184 - RNA, 19 nt, artificial
  RNA Oligomer
accauuuuguaagcauaac

SEQ ID NO: 1185 - RNA, 19 nt, artificial
  RNA Oligomer
uaacaggcaagagagucaa

SEQ ID NO: 1186 - RNA, 19 nt, artificial
  RNA Oligomer
aacuguuaguggaaaaagg

SEQ ID NO: 1187 - RNA, 19 nt, artificial
  RNA Oligomer
ugauuuggacagacaguuc

SEQ ID NO: 1188 - RNA, 19 nt, artificial
  RNA Oligomer
aguucuacaucgaugccca

SEQ ID NO: 1189 - RNA, 19 nt, artificial
  RNA Oligomer
agaaacacagugaaccuuu

SEQ ID NO: 1190 - RNA, 19 nt, artificial
  RNA Oligomer
aacacagugaaccuuugga

SEQ ID NO: 1191 - RNA, 19 nt, artificial
  RNA Oligomer
agcuuaacaauagacaugc

SEQ ID NO: 1192 - RNA, 19 nt, artificial
  RNA Oligomer
acaugcaaaacaacauuga

SEQ ID NO: 1193 - RNA, 19 nt, artificial
  RNA Oligomer
uugauuuaucuuggcccaa

SEQ ID NO: 1194 - RNA, 19 nt, artificial
  RNA Oligomer
ugauuuaucuuggcccaau

SEQ ID NO: 1195 - RNA, 19 nt, artificial
  RNA Oligomer
ucuauaaagauuggcuuug

SEQ ID NO: 1196 - RNA, 19 nt, artificial
  RNA Oligomer
auaaagauuggcuuuguag

SEQ ID NO: 1197 - RNA, 19 nt, artificial
  RNA Oligomer
agcauuugaagaguuuagu

SEQ ID NO: 1198 - RNA, 19 nt, artificial
  RNA Oligomer
guuuaguuuguuagaacac

SEQ ID NO: 1199 - RNA, 19 nt, artificial
  RNA Oligomer
uggcuaauuugaacaguga

SEQ ID NO: 1200 - RNA, 19 nt, artificial
  RNA Oligomer
cuuauaguaucaguaacag

SEQ ID NO: 1201 - RNA, 19 nt, artificial
  RNA Oligomer
uauaguaucaguaacagga

SEQ ID NO: 1202 - RNA, 19 nt, artificial
  RNA Oligomer
auaguaucaguaacaggau

SEQ ID NO: 1203 - RNA, 19 nt, artificial
  RNA Oligomer
aguaacaggaucacaccug

SEQ ID NO: 1204 - RNA, 19 nt, artificial
  RNA Oligomer
augaauacaucugucccua

SEQ ID NO: 1205 - RNA, 19 nt, artificial
  RNA Oligomer
gugaaguggagcuaauagc

SEQ ID NO: 1206 - RNA, 19 nt, artificial
  RNA Oligomer
uggagcuaauagcuagggc

SEQ ID NO: 1207 - RNA, 19 nt, artificial
  RNA Oligomer
auaagcuccuuauccacga

SEQ ID NO: 1208 - RNA, 19 nt, artificial
  RNA Oligomer
gcaaggauaugaaagccuu

SEQ ID NO: 1209 - RNA, 19 nt, artificial
  RNA Oligomer
auugaacauuguugagugg

SEQ ID NO: 1210 - RNA, 19 nt, artificial
  RNA Oligomer
gaacauuguugaguggagg

SEQ ID NO: 1211 - RNA, 19 nt, artificial
  RNA Oligomer
ucccuagugacagguaucc

SEQ ID NO: 1212 - RNA, 19 nt, artificial
  RNA Oligomer
agugacagguauccaaggu

SEQ ID NO: 1213 - RNA, 19 nt, artificial
  RNA Oligomer
augguuaucuggacgguga

SEQ ID NO: 1214 - RNA, 19 nt, artificial
  RNA Oligomer
guuaucuggacggugaguu

SEQ ID NO: 1215 - RNA, 19 nt, artificial
  RNA Oligomer
guacuauaaaccauaucuc

SEQ ID NO: 1216 - RNA, 19 nt, artificial
  RNA Oligomer
auaucuccauagccaaugc

SEQ ID NO: 1217 - RNA, 19 nt, artificial
  RNA Oligomer
ccucaaauauuaccucguu

SEQ ID NO: 1218 - RNA, 19 nt, artificial
  RNA Oligomer
cucaaauauuaccucguug

SEQ ID NO: 1219 - RNA, 19 nt, artificial
  RNA Oligomer
ucaaagugguaguauacag

SEQ ID NO: 1220 - RNA, 19 nt, artificial
  RNA Oligomer
aagugguaguauacagcua

SEQ ID NO: 1221 - RNA, 19 nt, artificial
  RNA Oligomer
agugguaguauacagcuac

SEQ ID NO: 1222 - RNA, 19 nt, artificial
  RNA Oligomer
agaugagauaacacugcca

SEQ ID NO: 1223 - RNA, 19 nt, artificial
  RNA Oligomer
ugaaaugguucaucugaga

SEQ ID NO: 1224 - RNA, 19 nt, artificial
  RNA Oligomer
aaugguucaucugagauua

SEQ ID NO: 1225 - RNA, 19 nt, artificial
  RNA Oligomer
cuaagugaaucagagaggg

SEQ ID NO: 1226 - RNA, 19 nt, artificial
  RNA Oligomer
agugaaucagagagggacu

SEQ ID NO: 1227 - RNA, 19 nt, artificial
  RNA Oligomer
gugaaucagagagggacua

SEQ ID NO: 1228 - RNA, 19 nt, artificial
  RNA Oligomer
ucaauggaagaguaaucaa

SEQ ID NO: 1229 - RNA, 19 nt, artificial
  RNA Oligomer
gaagaguaaucaacuacac

SEQ ID NO: 1230 - RNA, 19 nt, artificial
  RNA Oligomer
caacacuuaagaacagggg

SEQ ID NO: 1231 - RNA, 19 nt, artificial
  RNA Oligomer
acacuuaagaacaggggaa

SEQ ID NO: 1232 - RNA, 19 nt, artificial
  RNA Oligomer
uuaagaacaggggaaacug

SEQ ID NO: 1233 - RNA, 19 nt, artificial
  RNA Oligomer
aaacugagcuuauaaaggc

SEQ ID NO: 1234 - RNA, 19 nt, artificial
  RNA Oligomer
aaggcaucuaaaacaacac

SEQ ID NO: 1235 - RNA, 19 nt, artificial
  RNA Oligomer
gcaucuaaaacaacaccgu

SEQ ID NO: 1236 - RNA, 19 nt, artificial
  RNA Oligomer
aucuaaaacaacaccgugg

SEQ ID NO: 1237 - RNA, 19 nt, artificial
  RNA Oligomer
acaacaccgugguuacuga

SEQ ID NO: 1238 - RNA, 19 nt, artificial
  RNA Oligomer
accgugguuacugaaaugg

SEQ ID NO: 1239 - RNA, 19 nt, artificial
  RNA Oligomer
cucaccuacuuaauccuac

SEQ ID NO: 1240 - RNA, 19 nt, artificial
  RNA Oligomer
ucaccuacuuaauccuacc

SEQ ID NO: 1241 - RNA, 19 nt, artificial
  RNA Oligomer
uuccugucuaaaaacccuu

SEQ ID NO: 1242 - RNA, 19 nt, artificial
  RNA Oligomer
cugucuaaaaacccuucaa

SEQ ID NO: 1243 - RNA, 19 nt, artificial
  RNA Oligomer
aaauuugagucaggaacug

SEQ ID NO: 1244 - RNA, 19 nt, artificial
  RNA Oligomer
auuugagucaggaacuggu

SEQ ID NO: 1245 - RNA, 19 nt, artificial
  RNA Oligomer
uuuuggaaguuuugauagg

SEQ ID NO: 1246 - RNA, 19 nt, artificial
  RNA Oligomer
uagucaaaaucacuuagca

SEQ ID NO: 1247 - RNA, 19 nt, artificial
  RNA Oligomer
ccugaaaccaaauugugga

SEQ ID NO: 1248 - RNA, 19 nt, artificial
  RNA Oligomer
aaaccaaauuguggaauca

SEQ ID NO: 1249 - RNA, 19 nt, artificial
  RNA Oligomer
guacaaaaaugggaucuau

SEQ ID NO: 1250 - RNA, 19 nt, artificial
  RNA Oligomer
ucacuuagcaggcucucug

SEQ ID NO: 1251 - RNA, 19 nt, artificial
  RNA Oligomer
aucuaugcagaaaaucuac

SEQ ID NO: 1252 - RNA, 19 nt, artificial
  RNA Oligomer
augcagaaaaucuacacua

SEQ ID NO: 1253 - RNA, 19 nt, artificial
  RNA Oligomer
ugcagaaaaucuacacuau

SEQ ID NO: 1254 - RNA, 19 nt, artificial
  RNA Oligomer
uugcuaugaaugugaaaca

SEQ ID NO: 1255 - RNA, 19 nt, artificial
  RNA Oligomer
uucuuauuuagggcaggug

SEQ ID NO: 1256 - RNA, 19 nt, artificial
  RNA Oligomer
gcaaacuacaaaugacuuu

SEQ ID NO: 1257 - RNA, 19 nt, artificial
  RNA Oligomer
augacuuuagcugacuagc

SEQ ID NO: 1258 - RNA, 19 nt, artificial
  RNA Oligomer
acuuuagcugacuagcuga

SEQ ID NO: 1259 - RNA, 19 nt, artificial
  RNA Oligomer
cugaauaguuuuacuaccc

SEQ ID NO: 1260 - RNA, 19 nt, artificial
  RNA Oligomer
agcaauucugaaaugcugg

SEQ ID NO: 1261 - RNA, 19 nt, artificial
  RNA Oligomer
aagucgaaauccugagcug

SEQ ID NO: 1262 - RNA, 19 nt, artificial
  RNA Oligomer
gagcugaggaucagaguuc

SEQ ID NO: 1263 - RNA, 19 nt, artificial
  RNA Oligomer
ugaaaccagaggagaagcg

SEQ ID NO: 1264 - RNA, 19 nt, artificial
  RNA Oligomer
cucuacuaaagaaaaaguc

SEQ ID NO: 1265 - RNA, 19 nt, artificial
  RNA Oligomer
cuaaagaaaaagucccuga

SEQ ID NO: 1266 - RNA, 19 nt, artificial
  RNA Oligomer
uaaagaaaaagucccugaa

SEQ ID NO: 1267 - RNA, 19 nt, artificial
  RNA Oligomer
acaaguguaagcucaaaag

SEQ ID NO: 1268 - RNA, 19 nt, artificial
  RNA Oligomer
guaagcucaaaaguaggua

SEQ ID NO: 1269 - RNA, 19 nt, artificial
  RNA Oligomer
uaagcucaaaaguagguac

SEQ ID NO: 1270 - RNA, 19 nt, artificial
  RNA Oligomer
uuucaauuuccaaguucac

SEQ ID NO: 1271 - RNA, 19 nt, artificial
  RNA Oligomer
aauuuccaaguucacgugc

SEQ ID NO: 1272 - RNA, 19 nt, artificial
  RNA Oligomer
ugggucaguuucucaggga

SEQ ID NO: 1273 - RNA, 19 nt, artificial
  RNA Oligomer
uucucagggacaaggaccu

SEQ ID NO: 1274 - RNA, 19 nt, artificial
  RNA Oligomer
gcaaccaaguuuaguuugc

SEQ ID NO: 1275 - RNA, 19 nt, artificial
  RNA Oligomer
aguuugcuuugauuuggac

SEQ ID NO: 1276 - RNA, 19 nt, artificial
  RNA Oligomer
uugcuuugauuuggacaga

SEQ ID NO: 1277 - RNA, 19 nt, artificial
  RNA Oligomer
auuuuguaagcauaacagg

SEQ ID NO: 1278 - RNA, 19 nt, artificial
  RNA Oligomer
uuuuguaagcauaacaggc

SEQ ID NO: 1279 - RNA, 19 nt, artificial
  RNA Oligomer
agagagucaaagauaacug

SEQ ID NO: 1280 - RNA, 19 nt, artificial
  RNA Oligomer
ucaaagauaacuguuagug

SEQ ID NO: 1281 - RNA, 19 nt, artificial
  RNA Oligomer
aaagauaacuguuagugga

SEQ ID NO: 1282 - RNA, 19 nt, artificial
  RNA Oligomer
gauuuggacagacaguucu

SEQ ID NO: 1283 - RNA, 19 nt, artificial
  RNA Oligomer
aagaagccuugcccaguca

SEQ ID NO: 1284 - RNA, 19 nt, artificial
  RNA Oligomer
agcggcagaaacacaguga

SEQ ID NO: 1285 - RNA, 19 nt, artificial
  RNA Oligomer
cagaaacacagugaaccuu

SEQ ID NO: 1286 - RNA, 19 nt, artificial
  RNA Oligomer
caacauugauuuaucuugg

SEQ ID NO: 1287 - RNA, 19 nt, artificial
  RNA Oligomer
agauuggcuuuguaguauc

SEQ ID NO: 1288 - RNA, 19 nt, artificial
  RNA Oligomer
uuggcuuuguaguaucuuu

SEQ ID NO: 1289 - RNA, 19 nt, artificial
  RNA Oligomer
uggcuuuguaguaucuuuc

SEQ ID NO: 1290 - RNA, 19 nt, artificial
  RNA Oligomer
gcuuuguaguaucuuucca

SEQ ID NO: 1291 - RNA, 19 nt, artificial
  RNA Oligomer
cuuuguaguaucuuuccaa

SEQ ID NO: 1292 - RNA, 19 nt, artificial
  RNA Oligomer
uguaguaucuuuccaagca

SEQ ID NO: 1293 - RNA, 19 nt, artificial
  RNA Oligomer
guaguaucuuuccaagcau

SEQ ID NO: 1294 - RNA, 19 nt, artificial
  RNA Oligomer
aagcauuugaagaguuuag

SEQ ID NO: 1295 - RNA, 19 nt, artificial
  RNA Oligomer
gugacauuuuaggucacuu

SEQ ID NO: 1296 - RNA, 19 nt, artificial
  RNA Oligomer
aguaucaguaacaggauca

SEQ ID NO: 1297 - RNA, 19 nt, artificial
  RNA Oligomer
guaacaggaucacaccugu

SEQ ID NO: 1298 - RNA, 19 nt, artificial
  RNA Oligomer
uuuucaguaacaccaggau

SEQ ID NO: 1299 - RNA, 19 nt, artificial
  RNA Oligomer
aggaugaauacaucugucc

SEQ ID NO: 1300 - RNA, 19 nt, artificial
  RNA Oligomer
cagcaugugaaguggagcu

SEQ ID NO: 1301 - RNA, 19 nt, artificial
  RNA Oligomer
ugaaguggagcuaauagcu

SEQ ID NO: 1302 - RNA, 19 nt, artificial
  RNA Oligomer
uuaaccaaauucuggcaag

SEQ ID NO: 1303 - RNA, 19 nt, artificial
  RNA Oligomer
aaaccugaauaagcuccuu

SEQ ID NO: 1304 - RNA, 19 nt, artificial
  RNA Oligomer
acagcaaggauaugaaagc

SEQ ID NO: 1305 - RNA, 19 nt, artificial
  RNA Oligomer
uggaggcuaaauucucuca

SEQ ID NO: 1306 - RNA, 19 nt, artificial
  RNA Oligomer
ggaggcuaaauucucucau

SEQ ID NO: 1307 - RNA, 19 nt, artificial
  RNA Oligomer
auucuggcaaguugauucc

SEQ ID NO: 1308 - RNA, 19 nt, artificial
  RNA Oligomer
aggccuuuauuauucccua

SEQ ID NO: 1309 - RNA, 19 nt, artificial
  RNA Oligomer
cuuuauuauucccuaguga

SEQ ID NO: 1310 - RNA, 19 nt, artificial
  RNA Oligomer
uuauucccuagugacaggu

SEQ ID NO: 1311 - RNA, 19 nt, artificial
  RNA Oligomer
auucccuagugacagguau

SEQ ID NO: 1312 - RNA, 19 nt, artificial
  RNA Oligomer
ccuagugacagguauccaa

SEQ ID NO: 1313 - RNA, 19 nt, artificial
  RNA Oligomer
gugacagguauccaaggug

SEQ ID NO: 1314 - RNA, 19 nt, artificial
  RNA Oligomer
gcaugguuaucuggacggu

SEQ ID NO: 1315 - RNA, 19 nt, artificial
  RNA Oligomer
cauagccaaugcagacuuc

SEQ ID NO: 1316 - RNA, 19 nt, artificial
  RNA Oligomer
ugacccguuucaauaauuc

SEQ ID NO: 1317 - RNA, 19 nt, artificial
  RNA Oligomer
ugguaguauacagcuacua

SEQ ID NO: 1318 - RNA, 19 nt, artificial
  RNA Oligomer
uaguauacagcuacuaccc

SEQ ID NO: 1319 - RNA, 19 nt, artificial
  RNA Oligomer
uacagcuacuacccuugac

SEQ ID NO: 1320 - RNA, 19 nt, artificial
  RNA Oligomer
guuaaggagagauacuuca

SEQ ID NO: 1321 - RNA, 19 nt, artificial
  RNA Oligomer
uuaaggagagauacuucaa

SEQ ID NO: 1322 - RNA, 19 nt, artificial
  RNA Oligomer
gagagauacuucaauuccc

SEQ ID NO: 1323 - RNA, 19 nt, artificial
  RNA Oligomer
agagauacuucaauuccca

SEQ ID NO: 1324 - RNA, 19 nt, artificial
  RNA Oligomer
uucaauucccagaaaagcc

SEQ ID NO: 1325 - RNA, 19 nt, artificial
  RNA Oligomer
uuaccucguugagguuggg

SEQ ID NO: 1326 - RNA, 19 nt, artificial
  RNA Oligomer
agagaugagauaacacugc

SEQ ID NO: 1327 - RNA, 19 nt, artificial
  RNA Oligomer
gugaaaugguucaucugag

SEQ ID NO: 1328 - RNA, 19 nt, artificial
  RNA Oligomer
ucguugagguuggguucag

SEQ ID NO: 1329 - RNA, 19 nt, artificial
  RNA Oligomer
agauuacuaagugaaucag

SEQ ID NO: 1330 - RNA, 19 nt, artificial
  RNA Oligomer
auuacuaagugaaucagag

SEQ ID NO: 1331 - RNA, 19 nt, artificial
  RNA Oligomer
acuaagugaaucagagagg

SEQ ID NO: 1332 - RNA, 19 nt, artificial
  RNA Oligomer
gucaacggcucuguuuccu

SEQ ID NO: 1333 - RNA, 19 nt, artificial
  RNA Oligomer
uucacucaauggaagagua

SEQ ID NO: 1334 - RNA, 19 nt, artificial
  RNA Oligomer
agaguaaucaacuacacac

SEQ ID NO: 1335 - RNA, 19 nt, artificial
  RNA Oligomer
cacacaaaaauaucaguuc

SEQ ID NO: 1336 - RNA, 19 nt, artificial
  RNA Oligomer
aagacaguauucaacacuu

SEQ ID NO: 1337 - RNA, 19 nt, artificial
  RNA Oligomer
aacacuuaagaacagggga

SEQ ID NO: 1338 - RNA, 19 nt, artificial
  RNA Oligomer
agaacaggggaaacugagc

SEQ ID NO: 1339 - RNA, 19 nt, artificial
  RNA Oligomer
gaacaggggaaacugagcu

SEQ ID NO: 1340 - RNA, 19 nt, artificial
  RNA Oligomer
uucaggaacaacauaaucc

SEQ ID NO: 1341 - RNA, 19 nt, artificial
  RNA Oligomer
acaggggaaacugagcuua

SEQ ID NO: 1342 - RNA, 19 nt, artificial
  RNA Oligomer
aacugagcuuauaaaggca

SEQ ID NO: 1343 - RNA, 19 nt, artificial
  RNA Oligomer
ugagcuuauaaaggcaucu

SEQ ID NO: 1344 - RNA, 19 nt, artificial
  RNA Oligomer
agcuuauaaaggcaucuaa

SEQ ID NO: 1345 - RNA, 19 nt, artificial
  RNA Oligomer
ggcaucuaaaacaacaccg

SEQ ID NO: 1346 - RNA, 19 nt, artificial
  RNA Oligomer
uaaaacaacaccgugguua

SEQ ID NO: 1347 - RNA, 19 nt, artificial
  RNA Oligomer
aacaacauaaucccaguag

SEQ ID NO: 1348 - RNA, 19 nt, artificial
  RNA Oligomer
acaacauaaucccaguagu

SEQ ID NO: 1349 - RNA, 19 nt, artificial
  RNA Oligomer
aacagugaagcaguuccau

SEQ ID NO: 1350 - RNA, 19 nt, artificial
  RNA Oligomer
aguuccauuauugccguaa

SEQ ID NO: 1351 - RNA, 19 nt, artificial
  RNA Oligomer
gcuuuaauuaaacucaccu

SEQ ID NO: 1352 - RNA, 19 nt, artificial
  RNA Oligomer
aacucaccuacuuaauccu

SEQ ID NO: 1353 - RNA, 19 nt, artificial
  RNA Oligomer
cuuaauccuaccuuccugu

SEQ ID NO: 1354 - RNA, 19 nt, artificial
  RNA Oligomer
cuuccugucuaaaaacccu

SEQ ID NO: 1355 - RNA, 19 nt, artificial
  RNA Oligomer
uccugucuaaaaacccuuc

SEQ ID NO: 1356 - RNA, 19 nt, artificial
  RNA Oligomer
ccugucuaaaaacccuuca

SEQ ID NO: 1357 - RNA, 19 nt, artificial
  RNA Oligomer
ugucuaaaaacccuucaaa

SEQ ID NO: 1358 - RNA, 19 nt, artificial
  RNA Oligomer
ucccaguagucaaaaucac

SEQ ID NO: 1359 - RNA, 19 nt, artificial
  RNA Oligomer
cuucaaauuugagucagga

SEQ ID NO: 1360 - RNA, 19 nt, artificial
  RNA Oligomer
uccucugaaaacuuagaga

SEQ ID NO: 1361 - RNA, 19 nt, artificial
  RNA Oligomer
ucuauuaccaagccuaccu

SEQ ID NO: 1362 - RNA, 19 nt, artificial
  RNA Oligomer
cuaccugaaaccaaauugu

SEQ ID NO: 1363 - RNA, 19 nt, artificial
  RNA Oligomer
guggaaucaaauguaaaac

SEQ ID NO: 1364 - RNA, 19 nt, artificial
  RNA Oligomer
guaaaacucaaaugggcuu

SEQ ID NO: 1365 - RNA, 19 nt, artificial
  RNA Oligomer
aaacucaaaugggcuucua

SEQ ID NO: 1366 - RNA, 19 nt, artificial
  RNA Oligomer
ugggcuucuacuuuugcuu

SEQ ID NO: 1367 - RNA, 19 nt, artificial
  RNA Oligomer
uucuacuuuugcuuaccua

SEQ ID NO: 1368 - RNA, 19 nt, artificial
  RNA Oligomer
uacuuuugcuuaccuauuc

SEQ ID NO: 1369 - RNA, 19 nt, artificial
  RNA Oligomer
uugcuuaccuauuccaucc

SEQ ID NO: 1370 - RNA, 19 nt, artificial
  RNA Oligomer
ugcuuaccuauuccauccc

SEQ ID NO: 1371 - RNA, 19 nt, artificial
  RNA Oligomer
uuccaucccauucaauucu

SEQ ID NO: 1372 - RNA, 19 nt, artificial
  RNA Oligomer
aaaaaugggaucuaugcag

SEQ ID NO: 1373 - RNA, 19 nt, artificial
  RNA Oligomer
gaucuaugcagaaaaucua

SEQ ID NO: 1374 - RNA, 19 nt, artificial
  RNA Oligomer
aaucacuucuccaaaggcc

SEQ ID NO: 1375 - RNA, 19 nt, artificial
  RNA Oligomer
ucugggugauagccacagu

SEQ ID NO: 1376 - RNA, 19 nt, artificial
  RNA Oligomer
aaaggccagaaaaucagcc

SEQ ID NO: 1377 - RNA, 19 nt, artificial
  RNA Oligomer
ggccagaaaaucagccugu

SEQ ID NO: 1378 - RNA, 19 nt, artificial
  RNA Oligomer
gccagaaaaucagccuguu

SEQ ID NO: 1379 - RNA, 19 nt, artificial
  RNA Oligomer
aucagccuguuagcugcag

SEQ ID NO: 1380 - RNA, 19 nt, artificial
  RNA Oligomer
ccuguuagcugcaguugcu

SEQ ID NO: 1381 - RNA, 19 nt, artificial
  RNA Oligomer
cuguuagcugcaguugcua

SEQ ID NO: 1382 - RNA, 19 nt, artificial
  RNA Oligomer
uuagcugcaguugcuauga

SEQ ID NO: 1383 - RNA, 19 nt, artificial
  RNA Oligomer
gcaguugcuaugaauguga

SEQ ID NO: 1384 - RNA, 19 nt, artificial
  RNA Oligomer
ccacaguccagcaauucug

SEQ ID NO: 1385 - RNA, 19 nt, artificial
  RNA Oligomer
gggguuucuuauuuagggc

SEQ ID NO: 1386 - RNA, 19 nt, artificial
  RNA Oligomer
ucuuauuuagggcaggugg

SEQ ID NO: 1387 - RNA, 19 nt, artificial
  RNA Oligomer
ggggcaaacuacaaaugac

SEQ ID NO: 1388 - RNA, 19 nt, artificial
  RNA Oligomer
acuagcugaauaguuuuac

SEQ ID NO: 1389 - RNA, 19 nt, artificial
  RNA Oligomer
gaauaguuuuacuacccaa

SEQ ID NO: 1390 - RNA, 19 nt, artificial
  RNA Oligomer
ucgaaauccugagcugagg

SEQ ID NO: 1391 - RNA, 19 nt, artificial
  RNA Oligomer
cugaggaucagaguucucc

SEQ ID NO: 1392 - RNA, 19 nt, artificial
  RNA Oligomer
gaaaccagaggagaagcga

SEQ ID NO: 1393 - RNA, 19 nt, artificial
  RNA Oligomer
aaaccagaggagaagcgac

SEQ ID NO: 1394 - RNA, 19 nt, artificial
  RNA Oligomer
ucuacuaaagaaaaagucc

SEQ ID NO: 1395 - RNA, 19 nt, artificial
  RNA Oligomer
agucccugaagcuagucca

SEQ ID NO: 1396 - RNA, 19 nt, artificial
  RNA Oligomer
ugaagcuaguccaugagca

SEQ ID NO: 1397 - RNA, 19 nt, artificial
  RNA Oligomer
uguaagcucaaaaguaggu

SEQ ID NO: 1398 - RNA, 19 nt, artificial
  RNA Oligomer
agcucaaaaguagguacga

SEQ ID NO: 1399 - RNA, 19 nt, artificial
  RNA Oligomer
cucaaaaguagguacgacg

SEQ ID NO: 1400 - RNA, 19 nt, artificial
  RNA Oligomer
caauuuccaaguucacgug

SEQ ID NO: 1401 - RNA, 19 nt, artificial
  RNA Oligomer
ugcauaacacaaccucgca

SEQ ID NO: 1402 - RNA, 19 nt, artificial
  RNA Oligomer
gucaguuucucagggacaa

SEQ ID NO: 1403 - RNA, 19 nt, artificial
  RNA Oligomer
aguuucucagggacaagga

SEQ ID NO: 1404 - RNA, 19 nt, artificial
  RNA Oligomer
ccaguugcaaccaugguca

SEQ ID NO: 1405 - RNA, 19 nt, artificial
  RNA Oligomer
ugagcaaccaaguuuaguu

SEQ ID NO: 1406 - RNA, 19 nt, artificial
  RNA Oligomer
caaccaaguuuaguuugcu

SEQ ID NO: 1407 - RNA, 19 nt, artificial
  RNA Oligomer
ccauuuuguaagcauaaca

SEQ ID NO: 1408 - RNA, 19 nt, artificial
  RNA Oligomer
uuugauuuggacagacagu

SEQ ID NO: 1409 - RNA, 19 nt, artificial
  RNA Oligomer
agucaaagauaacuguuag

SEQ ID NO: 1410 - RNA, 19 nt, artificial
  RNA Oligomer
caguucuacaucgaugccc

SEQ ID NO: 1411 - RNA, 19 nt, artificial
  RNA Oligomer
aguggugacaacuccagga

SEQ ID NO: 1412 - RNA, 19 nt, artificial
  RNA Oligomer
aaccuuuggagcuuaacaa

SEQ ID NO: 1413 - RNA, 19 nt, artificial
  RNA Oligomer
cuuaacaauagacaugcaa

SEQ ID NO: 1414 - RNA, 19 nt, artificial
  RNA Oligomer
uagacaugcaaaacaacau

SEQ ID NO: 1415 - RNA, 19 nt, artificial
  RNA Oligomer
auuggcuuuguaguaucuu

SEQ ID NO: 1416 - RNA, 19 nt, artificial
  RNA Oligomer
uuuguaguaucuuuccaag

SEQ ID NO: 1417 - RNA, 19 nt, artificial
  RNA Oligomer
gcuaauuugaacagugaca

SEQ ID NO: 1418 - RNA, 19 nt, artificial
  RNA Oligomer
uaggucacuuauaguauca

SEQ ID NO: 1419 - RNA, 19 nt, artificial
  RNA Oligomer
uugcaaccauggucaacgg

SEQ ID NO: 1420 - RNA, 19 nt, artificial
  RNA Oligomer
accuguuuuucaguaacac

SEQ ID NO: 1421 - RNA, 19 nt, artificial
  RNA Oligomer
gaugaauacaucugucccu

SEQ ID NO: 1422 - RNA, 19 nt, artificial
  RNA Oligomer
auacaucugucccuacgcc

SEQ ID NO: 1423 - RNA, 19 nt, artificial
  RNA Oligomer
uccagcaugugaaguggag

SEQ ID NO: 1424 - RNA, 19 nt, artificial
  RNA Oligomer
cuaauagcuagggcaggaa

SEQ ID NO: 1425 - RNA, 19 nt, artificial
  RNA Oligomer
gaaaccugaauaagcuccu

SEQ ID NO: 1426 - RNA, 19 nt, artificial
  RNA Oligomer
accugaauaagcuccuuau

SEQ ID NO: 1427 - RNA, 19 nt, artificial
  RNA Oligomer
accaaauucuggcaaguug

SEQ ID NO: 1428 - RNA, 19 nt, artificial
  RNA Oligomer
augaaagccuugcugaauu

SEQ ID NO: 1429 - RNA, 19 nt, artificial
  RNA Oligomer
cugaauugaacauuguuga

SEQ ID NO: 1430 - RNA, 19 nt, artificial
  RNA Oligomer
uugaacauuguugagugga

SEQ ID NO: 1431 - RNA, 19 nt, artificial
  RNA Oligomer
augaucuacuuaguuggaa

SEQ ID NO: 1432 - RNA, 19 nt, artificial
  RNA Oligomer
aaggccuuuauuauucccu

SEQ ID NO: 1433 - RNA, 19 nt, artificial
  RNA Oligomer
ccuuuauuauucccuagug

SEQ ID NO: 1434 - RNA, 19 nt, artificial
  RNA Oligomer
ucuggcaaguugauuccuc

SEQ ID NO: 1435 - RNA, 19 nt, artificial
  RNA Oligomer
auuauucccuagugacagg

SEQ ID NO: 1436 - RNA, 19 nt, artificial
  RNA Oligomer
aaaucugggugcaugcaug

SEQ ID NO: 1437 - RNA, 19 nt, artificial
  RNA Oligomer
caugcaugguuaucuggac

SEQ ID NO: 1438 - RNA, 19 nt, artificial
  RNA Oligomer
ugcaugguuaucuggacgg

SEQ ID NO: 1439 - RNA, 19 nt, artificial
  RNA Oligomer
uggacggugaguuucauuc

SEQ ID NO: 1440 - RNA, 19 nt, artificial
  RNA Oligomer
gacggugaguuucauucuc

SEQ ID NO: 1441 - RNA, 19 nt, artificial
  RNA Oligomer
guuucauucucuaggcugu

SEQ ID NO: 1442 - RNA, 19 nt, artificial
  RNA Oligomer
aucuccauagccaaugcag

SEQ ID NO: 1443 - RNA, 19 nt, artificial
  RNA Oligomer
uccauagccaaugcagacu

SEQ ID NO: 1444 - RNA, 19 nt, artificial
  RNA Oligomer
ccauagccaaugcagacuu

SEQ ID NO: 1445 - RNA, 19 nt, artificial
  RNA Oligomer
acccguuucaauaauucaa

SEQ ID NO: 1446 - RNA, 19 nt, artificial
  RNA Oligomer
caaagugguaguauacagc

SEQ ID NO: 1447 - RNA, 19 nt, artificial
  RNA Oligomer
guauacagcuacuacccuu

SEQ ID NO: 1448 - RNA, 19 nt, artificial
  RNA Oligomer
gguuaaggagagauacuuc

SEQ ID NO: 1449 - RNA, 19 nt, artificial
  RNA Oligomer
gauacuucaauucccagaa

SEQ ID NO: 1450 - RNA, 19 nt, artificial
  RNA Oligomer
accucguugagguuggguu

SEQ ID NO: 1451 - RNA, 19 nt, artificial
  RNA Oligomer
ccauggugaaaugguucau

SEQ ID NO: 1452 - RNA, 19 nt, artificial
  RNA Oligomer
auggugaaaugguucaucu

SEQ ID NO: 1453 - RNA, 19 nt, artificial
  RNA Oligomer
aaaugguucaucugagauu

SEQ ID NO: 1454 - RNA, 19 nt, artificial
  RNA Oligomer
ucaucugagauuaagcaca

SEQ ID NO: 1455 - RNA, 19 nt, artificial
  RNA Oligomer
caucugagauuaagcacau

SEQ ID NO: 1456 - RNA, 19 nt, artificial
  RNA Oligomer
ucugagauuaagcacaugu

SEQ ID NO: 1457 - RNA, 19 nt, artificial
  RNA Oligomer
cugagauuaagcacaugua

SEQ ID NO: 1458 - RNA, 19 nt, artificial
  RNA Oligomer
auguaauacugaaaagagg

SEQ ID NO: 1459 - RNA, 19 nt, artificial
  RNA Oligomer
uacuaagugaaucagagag

SEQ ID NO: 1460 - RNA, 19 nt, artificial
  RNA Oligomer
uuggguucaggaacaacau

SEQ ID NO: 1461 - RNA, 19 nt, artificial
  RNA Oligomer
ucaacacuuaagaacaggg

SEQ ID NO: 1462 - RNA, 19 nt, artificial
  RNA Oligomer
acugagcuuauaaaggcau

SEQ ID NO: 1463 - RNA, 19 nt, artificial
  RNA Oligomer
aggaacaacauaaucccag

SEQ ID NO: 1464 - RNA, 19 nt, artificial
  RNA Oligomer
ugccucuuuaaaacauuag

SEQ ID NO: 1465 - RNA, 19 nt, artificial
  RNA Oligomer
acauaaucccaguagucaa

SEQ ID NO: 1466 - RNA, 19 nt, artificial
  RNA Oligomer
auugccguaauauuucuca

SEQ ID NO: 1467 - RNA, 19 nt, artificial
  RNA Oligomer
uugccguaauauuucucau

SEQ ID NO: 1468 - RNA, 19 nt, artificial
  RNA Oligomer
uuucucauuuacucuuacc

SEQ ID NO: 1469 - RNA, 19 nt, artificial
  RNA Oligomer
cucauuuacucuuaccuag

SEQ ID NO: 1470 - RNA, 19 nt, artificial
  RNA Oligomer
uuuacucuuaccuaggguu

SEQ ID NO: 1471 - RNA, 19 nt, artificial
  RNA Oligomer
agcuuuaauuaaacucacc

SEQ ID NO: 1472 - RNA, 19 nt, artificial
  RNA Oligomer
aauccuaccuuccugucua

SEQ ID NO: 1473 - RNA, 19 nt, artificial
  RNA Oligomer
acccuucaaauuugaguca

SEQ ID NO: 1474 - RNA, 19 nt, artificial
  RNA Oligomer
cccuucaaauuugagucag

SEQ ID NO: 1475 - RNA, 19 nt, artificial
  RNA Oligomer
uuugagucaggaacuggug

SEQ ID NO: 1476 - RNA, 19 nt, artificial
  RNA Oligomer
ugagucaggaacugguggu

SEQ ID NO: 1477 - RNA, 19 nt, artificial
  RNA Oligomer
aacugguggugugggcuuu

SEQ ID NO: 1478 - RNA, 19 nt, artificial
  RNA Oligomer
uagucuauuaccaagccua

SEQ ID NO: 1479 - RNA, 19 nt, artificial
  RNA Oligomer
ccuaccugaaaccaaauug

SEQ ID NO: 1480 - RNA, 19 nt, artificial
  RNA Oligomer
uguaaaacucaaaugggcu

SEQ ID NO: 1481 - RNA, 19 nt, artificial
  RNA Oligomer
ucaaaaucacuuagcaggc

SEQ ID NO: 1482 - RNA, 19 nt, artificial
  RNA Oligomer
augggcuucuacuuuugcu

SEQ ID NO: 1483 - RNA, 19 nt, artificial
  RNA Oligomer
ggcuucuacuuuugcuuac

SEQ ID NO: 1484 - RNA, 19 nt, artificial
  RNA Oligomer
aaucacuuagcaggcucuc

SEQ ID NO: 1485 - RNA, 19 nt, artificial
  RNA Oligomer
acaaaaaugggaucuaugc

SEQ ID NO: 1486 - RNA, 19 nt, artificial
  RNA Oligomer
uaugcagaaaaucuacacu

SEQ ID NO: 1487 - RNA, 19 nt, artificial
  RNA Oligomer
auuuugaaucacuucucca

SEQ ID NO: 1488 - RNA, 19 nt, artificial
  RNA Oligomer
ucagccuguuagcugcagu

SEQ ID NO: 1489 - RNA, 19 nt, artificial
  RNA Oligomer
cuaugaaugugaaacacag

SEQ ID NO: 1490 - RNA, 19 nt, artificial
  RNA Oligomer
augaaugugaaacacagaa

SEQ ID NO: 1491 - RNA, 19 nt, artificial
  RNA Oligomer
aaaagagacuacauuuggg

SEQ ID NO: 1492 - RNA, 19 nt, artificial
  RNA Oligomer
aaagagacuacauuugggg

SEQ ID NO: 1493 - RNA, 19 nt, artificial
  RNA Oligomer
agagacuacauuugggguu

SEQ ID NO: 1494 - RNA, 19 nt, artificial
  RNA Oligomer
gguuucuuauuuagggcag

SEQ ID NO: 1495 - RNA, 19 nt, artificial
  RNA Oligomer
uuucuuauuuagggcaggu

SEQ ID NO: 1496 - RNA, 19 nt, artificial
  RNA Oligomer
cuuauuuagggcagguggg

SEQ ID NO: 1497 - RNA, 19 nt, artificial
  RNA Oligomer
uguuguuccaaucagugag

SEQ ID NO: 1498 - RNA, 19 nt, artificial
  RNA Oligomer
aacaagucgaaauccugag

SEQ ID NO: 1499 - RNA, 19 nt, artificial
  RNA Oligomer
acaagucgaaauccugagc

SEQ ID NO: 1500 - RNA, 19 nt, artificial
  RNA Oligomer
caagucgaaauccugagcu

SEQ ID NO: 1501 - RNA, 19 nt, artificial
  RNA Oligomer
ugaggaucagaguucuccu

SEQ ID NO: 1502 - RNA, 19 nt, artificial
  RNA Oligomer
ucuugcugcucaaacugcc

SEQ ID NO: 1503 - RNA, 19 nt, artificial
  RNA Oligomer
aaacacaaguguaagcuca

SEQ ID NO: 1504 - RNA, 19 nt, artificial
  RNA Oligomer
acacaaguguaagcucaaa

SEQ ID NO: 1505 - RNA, 19 nt, artificial
  RNA Oligomer
cgacgcuagaaucacacac

SEQ ID NO: 1506 - RNA, 19 nt, artificial
  RNA Oligomer
acgcuagaaucacacacaa

SEQ ID NO: 1507 - RNA, 19 nt, artificial
  RNA Oligomer
ucacacacaauccuaucca

SEQ ID NO: 1508 - RNA, 19 nt, artificial
  RNA Oligomer
acaauccuauccagcuuuu

SEQ ID NO: 1509 - RNA, 19 nt, artificial
  RNA Oligomer
uauccagcuuuuuacauac

SEQ ID NO: 1510 - RNA, 19 nt, artificial
  RNA Oligomer
uccagcuuuuuacauacau

SEQ ID NO: 1511 - RNA, 19 nt, artificial
  RNA Oligomer
gagcaauucucugggucag

SEQ ID NO: 1512 - RNA, 19 nt, artificial
  RNA Oligomer
aacugccaguugcaaccau

SEQ ID NO: 1513 - RNA, 19 nt, artificial
  RNA Oligomer
uuaauuuaacagccuucca

SEQ ID NO: 1514 - RNA, 19 nt, artificial
  RNA Oligomer
uuaacagccuuccauaagc

SEQ ID NO: 1515 - RNA, 19 nt, artificial
  RNA Oligomer
cuuugauuuggacagacag

SEQ ID NO: 1516 - RNA, 19 nt, artificial
  RNA Oligomer
aaggacaacaguucuacau

SEQ ID NO: 1517 - RNA, 19 nt, artificial
  RNA Oligomer
aacaguucuacaucgaugc

SEQ ID NO: 1518 - RNA, 19 nt, artificial
  RNA Oligomer
agacaugcaaaacaacauu

SEQ ID NO: 1519 - RNA, 19 nt, artificial
  RNA Oligomer
auugauuuaucuuggccca

SEQ ID NO: 1520 - RNA, 19 nt, artificial
  RNA Oligomer
auuuaucuuggcccaauuc

SEQ ID NO: 1521 - RNA, 19 nt, artificial
  RNA Oligomer
uuuaucuuggcccaauucu

SEQ ID NO: 1522 - RNA, 19 nt, artificial
  RNA Oligomer
uuuccaagcauuugaagag

SEQ ID NO: 1523 - RNA, 19 nt, artificial
  RNA Oligomer
uuccaagcauuugaagagu

SEQ ID NO: 1524 - RNA, 19 nt, artificial
  RNA Oligomer
ggcuaauuugaacagugac

SEQ ID NO: 1525 - RNA, 19 nt, artificial
  RNA Oligomer
cagugacauuuuaggucac

SEQ ID NO: 1526 - RNA, 19 nt, artificial
  RNA Oligomer
aggucacuuauaguaucag

SEQ ID NO: 1527 - RNA, 19 nt, artificial
  RNA Oligomer
ggucacuuauaguaucagu

SEQ ID NO: 1528 - RNA, 19 nt, artificial
  RNA Oligomer
gucacuuauaguaucagua

SEQ ID NO: 1529 - RNA, 19 nt, artificial
  RNA Oligomer
uaguaucaguaacaggauc

SEQ ID NO: 1530 - RNA, 19 nt, artificial
  RNA Oligomer
ucaguaacaggaucacacc

SEQ ID NO: 1531 - RNA, 19 nt, artificial
  RNA Oligomer
gaucacaccuguuuuucag

SEQ ID NO: 1532 - RNA, 19 nt, artificial
  RNA Oligomer
cuguuuuucaguaacacca

SEQ ID NO: 1533 - RNA, 19 nt, artificial
  RNA Oligomer
uguuuuucaguaacaccag

SEQ ID NO: 1534 - RNA, 19 nt, artificial
  RNA Oligomer
uuuuucaguaacaccagga

SEQ ID NO: 1535 - RNA, 19 nt, artificial
  RNA Oligomer
ccaggaugaauacaucugu

SEQ ID NO: 1536 - RNA, 19 nt, artificial
  RNA Oligomer
caggaugaauacaucuguc

SEQ ID NO: 1537 - RNA, 19 nt, artificial
  RNA Oligomer
aauacaucugucccuacgc

SEQ ID NO: 1538 - RNA, 19 nt, artificial
  RNA Oligomer
gcuaauagcuagggcagga

SEQ ID NO: 1539 - RNA, 19 nt, artificial
  RNA Oligomer
gaauaagcuccuuauccac

SEQ ID NO: 1540 - RNA, 19 nt, artificial
  RNA Oligomer
uuauccacgacccacagca

SEQ ID NO: 1541 - RNA, 19 nt, artificial
  RNA Oligomer
aauucuggcaaguugauuc

SEQ ID NO: 1542 - RNA, 19 nt, artificial
  RNA Oligomer
uaaugaucuacuuaguugg

SEQ ID NO: 1543 - RNA, 19 nt, artificial
  RNA Oligomer
gacaaaaaauaaggccuuu

SEQ ID NO: 1544 - RNA, 19 nt, artificial
  RNA Oligomer
auaaggccuuuauuauucc

SEQ ID NO: 1545 - RNA, 19 nt, artificial
  RNA Oligomer
uaaggccuuuauuauuccc

SEQ ID NO: 1546 - RNA, 19 nt, artificial
  RNA Oligomer
ucugggugcaugcaugguu

SEQ ID NO: 1547 - RNA, 19 nt, artificial
  RNA Oligomer
gugcaugcaugguuaucug

SEQ ID NO: 1548 - RNA, 19 nt, artificial
  RNA Oligomer
ugguuaucuggacggugag

SEQ ID NO: 1549 - RNA, 19 nt, artificial
  RNA Oligomer
ucuggacggugaguuucau

SEQ ID NO: 1550 - RNA, 19 nt, artificial
  RNA Oligomer
acggugaguuucauucucu

SEQ ID NO: 1551 - RNA, 19 nt, artificial
  RNA Oligomer
uucauucucuaggcuguac

SEQ ID NO: 1552 - RNA, 19 nt, artificial
  RNA Oligomer
aggcuguacuauaaaccau

SEQ ID NO: 1553 - RNA, 19 nt, artificial
  RNA Oligomer
cuauaaaccauaucuccau

SEQ ID NO: 1554 - RNA, 19 nt, artificial
  RNA Oligomer
aaccauaucuccauagcca

SEQ ID NO: 1555 - RNA, 19 nt, artificial
  RNA Oligomer
uaucuccauagccaaugca

SEQ ID NO: 1556 - RNA, 19 nt, artificial
  RNA Oligomer
auucaaagugguaguauac

SEQ ID NO: 1557 - RNA, 19 nt, artificial
  RNA Oligomer
aaagugguaguauacagcu

SEQ ID NO: 1558 - RNA, 19 nt, artificial
  RNA Oligomer
guaguauacagcuacuacc

SEQ ID NO: 1559 - RNA, 19 nt, artificial
  RNA Oligomer
uauacagcuacuacccuug

SEQ ID NO: 1560 - RNA, 19 nt, artificial
  RNA Oligomer
ugacaauugggguuaagga

SEQ ID NO: 1561 - RNA, 19 nt, artificial
  RNA Oligomer
ggguuaaggagagauacuu

SEQ ID NO: 1562 - RNA, 19 nt, artificial
  RNA Oligomer
agauacuucaauucccaga

SEQ ID NO: 1563 - RNA, 19 nt, artificial
  RNA Oligomer
auacuucaauucccagaaa

SEQ ID NO: 1564 - RNA, 19 nt, artificial
  RNA Oligomer
gagaugagauaacacugcc

SEQ ID NO: 1565 - RNA, 19 nt, artificial
  RNA Oligomer
gaugagauaacacugccau

SEQ ID NO: 1566 - RNA, 19 nt, artificial
  RNA Oligomer
agauaacacugccauggug

SEQ ID NO: 1567 - RNA, 19 nt, artificial
  RNA Oligomer
guucaucugagauuaagca

SEQ ID NO: 1568 - RNA, 19 nt, artificial
  RNA Oligomer
aucugagauuaagcacaug

SEQ ID NO: 1569 - RNA, 19 nt, artificial
  RNA Oligomer
ugagauuaagcacauguaa

SEQ ID NO: 1570 - RNA, 19 nt, artificial
  RNA Oligomer
uuaagcacauguaauacug

SEQ ID NO: 1571 - RNA, 19 nt, artificial
  RNA Oligomer
aggauagauuacuaaguga

SEQ ID NO: 1572 - RNA, 19 nt, artificial
  RNA Oligomer
uaauuuccuauccucacag

SEQ ID NO: 1573 - RNA, 19 nt, artificial
  RNA Oligomer
aaagacaguauucaacacu

SEQ ID NO: 1574 - RNA, 19 nt, artificial
  RNA Oligomer
agacaguauucaacacuua

SEQ ID NO: 1575 - RNA, 19 nt, artificial
  RNA Oligomer
auucaacacuuaagaacag

SEQ ID NO: 1576 - RNA, 19 nt, artificial
  RNA Oligomer
uucaacacuuaagaacagg

SEQ ID NO: 1577 - RNA, 19 nt, artificial
  RNA Oligomer
cugagcuuauaaaggcauc

SEQ ID NO: 1578 - RNA, 19 nt, artificial
  RNA Oligomer
gagcuuauaaaggcaucua

SEQ ID NO: 1579 - RNA, 19 nt, artificial
  RNA Oligomer
aggcaucuaaaacaacacc

SEQ ID NO: 1580 - RNA, 19 nt, artificial
  RNA Oligomer
agcuuuuguugccucuuua

SEQ ID NO: 1581 - RNA, 19 nt, artificial
  RNA Oligomer
uuuguugccucuuuaaaac

SEQ ID NO: 1582 - RNA, 19 nt, artificial
  RNA Oligomer
uguugccucuuuaaaacau

SEQ ID NO: 1583 - RNA, 19 nt, artificial
  RNA Oligomer
caccaagaaacagugaagc

SEQ ID NO: 1584 - RNA, 19 nt, artificial
  RNA Oligomer
uauugccguaauauuucuc

SEQ ID NO: 1585 - RNA, 19 nt, artificial
  RNA Oligomer
aaacccuucaaauuugagu

SEQ ID NO: 1586 - RNA, 19 nt, artificial
  RNA Oligomer
ccaguagucaaaaucacuu

SEQ ID NO: 1587 - RNA, 19 nt, artificial
  RNA Oligomer
caguagucaaaaucacuua

SEQ ID NO: 1588 - RNA, 19 nt, artificial
  RNA Oligomer
cauuuaguaugauucugug

SEQ ID NO: 1589 - RNA, 19 nt, artificial
  RNA Oligomer
guagucaaaaucacuuagc

SEQ ID NO: 1590 - RNA, 19 nt, artificial
  RNA Oligomer
cuauuaccaagccuaccug

SEQ ID NO: 1591 - RNA, 19 nt, artificial
  RNA Oligomer
gcuuaccuauuccauccca

SEQ ID NO: 1592 - RNA, 19 nt, artificial
  RNA Oligomer
cuuaccuauuccaucccau

SEQ ID NO: 1593 - RNA, 19 nt, artificial
  RNA Oligomer
acagaaagaaaagagacua

SEQ ID NO: 1594 - RNA, 19 nt, artificial
  RNA Oligomer
acuacauuugggguuucuu

SEQ ID NO: 1595 - RNA, 19 nt, artificial
  RNA Oligomer
ugggguuucuuauuuaggg

SEQ ID NO: 1596 - RNA, 19 nt, artificial
  RNA Oligomer
ccuucaaucacuguuguuc

SEQ ID NO: 1597 - RNA, 19 nt, artificial
  RNA Oligomer
ucacuguuguuccaaucag

SEQ ID NO: 1598 - RNA, 19 nt, artificial
  RNA Oligomer
aaauccugagcugaggauc

SEQ ID NO: 1599 - RNA, 19 nt, artificial
  RNA Oligomer
ggaucagaguucuccugaa

SEQ ID NO: 1600 - RNA, 19 nt, artificial
  RNA Oligomer
ggagaagcgaccucuacua

SEQ ID NO: 1601 - RNA, 19 nt, artificial
  RNA Oligomer
aagaaaaagucccugaagc

SEQ ID NO: 1602 - RNA, 19 nt, artificial
  RNA Oligomer
augagcaguucuccugcuu

SEQ ID NO: 1603 - RNA, 19 nt, artificial
  RNA Oligomer
uaaacacaaguguaagcuc

SEQ ID NO: 1604 - RNA, 19 nt, artificial
  RNA Oligomer
uacgacgcuagaaucacac

SEQ ID NO: 1605 - RNA, 19 nt, artificial
  RNA Oligomer
uagaaucacacacaauccu

SEQ ID NO: 1606 - RNA, 19 nt, artificial
  RNA Oligomer
uuucucagggacaaggacc

SEQ ID NO: 1607 - RNA, 19 nt, artificial
  RNA Oligomer
uaagccaucaccauuuugu

SEQ ID NO: 1608 - RNA, 19 nt, artificial
  RNA Oligomer
agcauaacaggcaagagag

SEQ ID NO: 1609 - RNA, 19 nt, artificial
  RNA Oligomer
aggcaagagagucaaagau

SEQ ID NO: 1610 - RNA, 19 nt, artificial
  RNA Oligomer
aagauaacuguuaguggaa

SEQ ID NO: 1611 - RNA, 19 nt, artificial
  RNA Oligomer
gacaacaguucuacaucga

SEQ ID NO: 1612 - RNA, 19 nt, artificial
  RNA Oligomer
ucuacaucgaugcccaaga

SEQ ID NO: 1613 - RNA, 19 nt, artificial
  RNA Oligomer
ucgaugcccaagaagccuu

SEQ ID NO: 1614 - RNA, 19 nt, artificial
  RNA Oligomer
uuggagcuuaacaauagac

SEQ ID NO: 1615 - RNA, 19 nt, artificial
  RNA Oligomer
uggagcuuaacaauagaca

SEQ ID NO: 1616 - RNA, 19 nt, artificial
  RNA Oligomer
gcuuaacaauagacaugca

SEQ ID NO: 1617 - RNA, 19 nt, artificial
  RNA Oligomer
acaauagacaugcaaaaca

SEQ ID NO: 1618 - RNA, 19 nt, artificial
  RNA Oligomer
caauagacaugcaaaacaa

SEQ ID NO: 1619 - RNA, 19 nt, artificial
  RNA Oligomer
agugacauuuuaggucacu

SEQ ID NO: 1620 - RNA, 19 nt, artificial
  RNA Oligomer
cacuuauaguaucaguaac

SEQ ID NO: 1621 - RNA, 19 nt, artificial
  RNA Oligomer
aacaggaucacaccuguuu

SEQ ID NO: 1622 - RNA, 19 nt, artificial
  RNA Oligomer
uucaguaacaccaggauga

SEQ ID NO: 1623 - RNA, 19 nt, artificial
  RNA Oligomer
acaccaggaugaauacauc

SEQ ID NO: 1624 - RNA, 19 nt, artificial
  RNA Oligomer
aaguggagcuaauagcuag

SEQ ID NO: 1625 - RNA, 19 nt, artificial
  RNA Oligomer
aaccugaauaagcuccuua

SEQ ID NO: 1626 - RNA, 19 nt, artificial
  RNA Oligomer
uaagcuccuuauccacgac

SEQ ID NO: 1627 - RNA, 19 nt, artificial
  RNA Oligomer
uccuuauccacgacccaca

SEQ ID NO: 1628 - RNA, 19 nt, artificial
  RNA Oligomer
cccacagcaaggauaugaa

SEQ ID NO: 1629 - RNA, 19 nt, artificial
  RNA Oligomer
aggcuaaauucucucauua

SEQ ID NO: 1630 - RNA, 19 nt, artificial
  RNA Oligomer
gcuaaauucucucauuaac

SEQ ID NO: 1631 - RNA, 19 nt, artificial
  RNA Oligomer
ucuacuuaguuggaauaag

SEQ ID NO: 1632 - RNA, 19 nt, artificial
  RNA Oligomer
cuuaguuggaauaagacaa

SEQ ID NO: 1633 - RNA, 19 nt, artificial
  RNA Oligomer
uuuauuauucccuagugac

SEQ ID NO: 1634 - RNA, 19 nt, artificial
  RNA Oligomer
uauuauucccuagugacag

SEQ ID NO: 1635 - RNA, 19 nt, artificial
  RNA Oligomer
augcaugguuaucuggacg

SEQ ID NO: 1636 - RNA, 19 nt, artificial
  RNA Oligomer
cggugaguuucauucucua

SEQ ID NO: 1637 - RNA, 19 nt, artificial
  RNA Oligomer
caauaauucaaagugguag

SEQ ID NO: 1638 - RNA, 19 nt, artificial
  RNA Oligomer
acagcuacuacccuugaca

SEQ ID NO: 1639 - RNA, 19 nt, artificial
  RNA Oligomer
caauugggguuaaggagag

SEQ ID NO: 1640 - RNA, 19 nt, artificial
  RNA Oligomer
cauggugaaaugguucauc

SEQ ID NO: 1641 - RNA, 19 nt, artificial
  RNA Oligomer
agcacauguaauacugaaa

SEQ ID NO: 1642 - RNA, 19 nt, artificial
  RNA Oligomer
uugagguuggguucaggaa

SEQ ID NO: 1643 - RNA, 19 nt, artificial
  RNA Oligomer
ugaaaagaggauagauuac

SEQ ID NO: 1644 - RNA, 19 nt, artificial
  RNA Oligomer
agguuggguucaggaacaa

SEQ ID NO: 1645 - RNA, 19 nt, artificial
  RNA Oligomer
gaucucagaacuaauuucc

SEQ ID NO: 1646 - RNA, 19 nt, artificial
  RNA Oligomer
agaacuaauuuccuauccu

SEQ ID NO: 1647 - RNA, 19 nt, artificial
  RNA Oligomer
cuaauuuccuauccucaca

SEQ ID NO: 1648 - RNA, 19 nt, artificial
  RNA Oligomer
aauuuccuauccucacagg

SEQ ID NO: 1649 - RNA, 19 nt, artificial
  RNA Oligomer
cuacacacaaaaauaucag

SEQ ID NO: 1650 - RNA, 19 nt, artificial
  RNA Oligomer
guauucaacacuuaagaac

SEQ ID NO: 1651 - RNA, 19 nt, artificial
  RNA Oligomer
ggaacaacauaaucccagu

SEQ ID NO: 1652 - RNA, 19 nt, artificial
  RNA Oligomer
uuagagugaggaagucacc

SEQ ID NO: 1653 - RNA, 19 nt, artificial
  RNA Oligomer
agagugaggaagucaccaa

SEQ ID NO: 1654 - RNA, 19 nt, artificial
  RNA Oligomer
aagucaccaagaaacagug

SEQ ID NO: 1655 - RNA, 19 nt, artificial
  RNA Oligomer
ucaccaagaaacagugaag

SEQ ID NO: 1656 - RNA, 19 nt, artificial
  RNA Oligomer
uuccauuauugccguaaua

SEQ ID NO: 1657 - RNA, 19 nt, artificial
  RNA Oligomer
ucucauuuacucuuaccua

SEQ ID NO: 1658 - RNA, 19 nt, artificial
  RNA Oligomer
cauuuacucuuaccuaggg

SEQ ID NO: 1659 - RNA, 19 nt, artificial
  RNA Oligomer
auccuaccuuccugucuaa

SEQ ID NO: 1660 - RNA, 19 nt, artificial
  RNA Oligomer
aguagucaaaaucacuuag

SEQ ID NO: 1661 - RNA, 19 nt, artificial
  RNA Oligomer
aaaacucaaaugggcuucu

SEQ ID NO: 1662 - RNA, 19 nt, artificial
  RNA Oligomer
aacucaaaugggcuucuac

SEQ ID NO: 1663 - RNA, 19 nt, artificial
  RNA Oligomer
cucaaaugggcuucuacuu

SEQ ID NO: 1664 - RNA, 19 nt, artificial
  RNA Oligomer
aaaugggcuucuacuuuug

SEQ ID NO: 1665 - RNA, 19 nt, artificial
  RNA Oligomer
caaaaucacuuagcaggcu

SEQ ID NO: 1666 - RNA, 19 nt, artificial
  RNA Oligomer
gcuucuacuuuugcuuacc

SEQ ID NO: 1667 - RNA, 19 nt, artificial
  RNA Oligomer
cuucuacuuuugcuuaccu

SEQ ID NO: 1668 - RNA, 19 nt, artificial
  RNA Oligomer
cuuuugcuuaccuauucca

SEQ ID NO: 1669 - RNA, 19 nt, artificial
  RNA Oligomer
uuuugcuuaccuauuccau

SEQ ID NO: 1670 - RNA, 19 nt, artificial
  RNA Oligomer
ccuauuccaucccauucaa

SEQ ID NO: 1671 - RNA, 19 nt, artificial
  RNA Oligomer
aaaucacuuagcaggcucu

SEQ ID NO: 1672 - RNA, 19 nt, artificial
  RNA Oligomer
aaaaugggaucuaugcaga

SEQ ID NO: 1673 - RNA, 19 nt, artificial
  RNA Oligomer
acuucuccaaaggccagaa

SEQ ID NO: 1674 - RNA, 19 nt, artificial
  RNA Oligomer
ugaaugugaaacacagaaa

SEQ ID NO: 1675 - RNA, 19 nt, artificial
  RNA Oligomer
cagaaagaaaagagacuac

SEQ ID NO: 1676 - RNA, 19 nt, artificial
  RNA Oligomer
agacuacauuugggguuuc

SEQ ID NO: 1677 - RNA, 19 nt, artificial
  RNA Oligomer
agcugaauaguuuuacuac

SEQ ID NO: 1678 - RNA, 19 nt, artificial
  RNA Oligomer
gcugaauaguuuuacuacc

SEQ ID NO: 1679 - RNA, 19 nt, artificial
  RNA Oligomer
aaucacuguuguuccaauc

SEQ ID NO: 1680 - RNA, 19 nt, artificial
  RNA Oligomer
uuguuccaaucagugagua

SEQ ID NO: 1681 - RNA, 19 nt, artificial
  RNA Oligomer
uucuuaacaagucgaaauc

SEQ ID NO: 1682 - RNA, 19 nt, artificial
  RNA Oligomer
cuuaacaagucgaaauccu

SEQ ID NO: 1683 - RNA, 19 nt, artificial
  RNA Oligomer
aggaucagaguucuccuga

SEQ ID NO: 1684 - RNA, 19 nt, artificial
  RNA Oligomer
aagucccugaagcuagucc

SEQ ID NO: 1685 - RNA, 19 nt, artificial
  RNA Oligomer
ccugaagcuaguccaugag

SEQ ID NO: 1686 - RNA, 19 nt, artificial
  RNA Oligomer
uaguccaugagcaguucuc

SEQ ID NO: 1687 - RNA, 19 nt, artificial
  RNA Oligomer
aguccaugagcaguucucc

SEQ ID NO: 1688 - RNA, 19 nt, artificial
  RNA Oligomer
uccaugagcaguucuccug

SEQ ID NO: 1689 - RNA, 19 nt, artificial
  RNA Oligomer
cuuaaacacaaguguaagc

SEQ ID NO: 1690 - RNA, 19 nt, artificial
  RNA Oligomer
cuagaaucacacacaaucc

SEQ ID NO: 1691 - RNA, 19 nt, artificial
  RNA Oligomer
aucacacacaauccuaucc

SEQ ID NO: 1692 - RNA, 19 nt, artificial
  RNA Oligomer
caaacugccaguugcaacc

SEQ ID NO: 1693 - RNA, 19 nt, artificial
  RNA Oligomer
cuuugagcaaccaaguuua

SEQ ID NO: 1694 - RNA, 19 nt, artificial
  RNA Oligomer
uaacagccuuccauaagcc

SEQ ID NO: 1695 - RNA, 19 nt, artificial
  RNA Oligomer
ccauaagccaucaccauuu

SEQ ID NO: 1696 - RNA, 19 nt, artificial
  RNA Oligomer
aagcauaacaggcaagaga

SEQ ID NO: 1697 - RNA, 19 nt, artificial
  RNA Oligomer
cuacaucgaugcccaagaa

SEQ ID NO: 1698 - RNA, 19 nt, artificial
  RNA Oligomer
cagugaaccuuuggagcuu

SEQ ID NO: 1699 - RNA, 19 nt, artificial
  RNA Oligomer
uuuggagcuuaacaauaga

SEQ ID NO: 1700 - RNA, 19 nt, artificial
  RNA Oligomer
cauugauuuaucuuggccc

SEQ ID NO: 1701 - RNA, 19 nt, artificial
  RNA Oligomer
uuaucuuggcccaauucua

SEQ ID NO: 1702 - RNA, 19 nt, artificial
  RNA Oligomer
ggcuuuguaguaucuuucc

SEQ ID NO: 1703 - RNA, 19 nt, artificial
  RNA Oligomer
uaucuuuccaagcauuuga

SEQ ID NO: 1704 - RNA, 19 nt, artificial
  RNA Oligomer
acaccuguuuuucaguaac

SEQ ID NO: 1705 - RNA, 19 nt, artificial
  RNA Oligomer
aacaccaggaugaauacau

SEQ ID NO: 1706 - RNA, 19 nt, artificial
  RNA Oligomer
accaggaugaauacaucug

SEQ ID NO: 1707 - RNA, 19 nt, artificial
  RNA Oligomer
ggagcuaauagcuagggca

SEQ ID NO: 1708 - RNA, 19 nt, artificial
  RNA Oligomer
aggaaaccugaauaagcuc

SEQ ID NO: 1709 - RNA, 19 nt, artificial
  RNA Oligomer
ggaaaccugaauaagcucc

SEQ ID NO: 1710 - RNA, 19 nt, artificial
  RNA Oligomer
acccacagcaaggauauga

SEQ ID NO: 1711 - RNA, 19 nt, artificial
  RNA Oligomer
aagccuugcugaauugaac

SEQ ID NO: 1712 - RNA, 19 nt, artificial
  RNA Oligomer
gcugaauugaacauuguug

SEQ ID NO: 1713 - RNA, 19 nt, artificial
  RNA Oligomer
uacuuaguuggaauaagac

SEQ ID NO: 1714 - RNA, 19 nt, artificial
  RNA Oligomer
ggccuuuauuauucccuag

SEQ ID NO: 1715 - RNA, 19 nt, artificial
  RNA Oligomer
cugggugcaugcaugguua

SEQ ID NO: 1716 - RNA, 19 nt, artificial
  RNA Oligomer
ggugcaugcaugguuaucu

SEQ ID NO: 1717 - RNA, 19 nt, artificial
  RNA Oligomer
gaguuucauucucuaggcu

SEQ ID NO: 1718 - RNA, 19 nt, artificial
  RNA Oligomer
ucucuaggcuguacuauaa

SEQ ID NO: 1719 - RNA, 19 nt, artificial
  RNA Oligomer
uaaaccauaucuccauagc

SEQ ID NO: 1720 - RNA, 19 nt, artificial
  RNA Oligomer
aauugggguuaaggagaga

SEQ ID NO: 1721 - RNA, 19 nt, artificial
  RNA Oligomer
auugggguuaaggagagau

SEQ ID NO: 1722 - RNA, 19 nt, artificial
  RNA Oligomer
aauucccagaaaagcccag

SEQ ID NO: 1723 - RNA, 19 nt, artificial
  RNA Oligomer
cugccauggugaaaugguu

SEQ ID NO: 1724 - RNA, 19 nt, artificial
  RNA Oligomer
aagcacauguaauacugaa

SEQ ID NO: 1725 - RNA, 19 nt, artificial
  RNA Oligomer
uguaauacugaaaagagga

SEQ ID NO: 1726 - RNA, 19 nt, artificial
  RNA Oligomer
guaauacugaaaagaggau

SEQ ID NO: 1727 - RNA, 19 nt, artificial
  RNA Oligomer
aauacugaaaagaggauag

SEQ ID NO: 1728 - RNA, 19 nt, artificial
  RNA Oligomer
acugaaaagaggauagauu

SEQ ID NO: 1729 - RNA, 19 nt, artificial
  RNA Oligomer
ggauagauuacuaagugaa

SEQ ID NO: 1730 - RNA, 19 nt, artificial
  RNA Oligomer
ucucagaacuaauuuccua

SEQ ID NO: 1731 - RNA, 19 nt, artificial
  RNA Oligomer
cagaacuaauuuccuaucc

SEQ ID NO: 1732 - RNA, 19 nt, artificial
  RNA Oligomer
gaacuaauuuccuauccuc

SEQ ID NO: 1733 - RNA, 19 nt, artificial
  RNA Oligomer
acuaauuuccuauccucac

SEQ ID NO: 1734 - RNA, 19 nt, artificial
  RNA Oligomer
agucuauuaccaagccuac

SEQ ID NO: 1735 - RNA, 19 nt, artificial
  RNA Oligomer
gucaaaaucacuuagcagg

SEQ ID NO: 1736 - RNA, 19 nt, artificial
  RNA Oligomer
caaaaaugggaucuaugca

SEQ ID NO: 1737 - RNA, 19 nt, artificial
  RNA Oligomer
augugaaacacagaaagaa

SEQ ID NO: 1738 - RNA, 19 nt, artificial
  RNA Oligomer
agaaaagagacuacauuug

SEQ ID NO: 1739 - RNA, 19 nt, artificial
  RNA Oligomer
gagacuacauuugggguuu

SEQ ID NO: 1740 - RNA, 19 nt, artificial
  RNA Oligomer
ggguuucuuauuuagggca

SEQ ID NO: 1741 - RNA, 19 nt, artificial
  RNA Oligomer
cugacuagcugaauaguuu

SEQ ID NO: 1742 - RNA, 19 nt, artificial
  RNA Oligomer
uuuaggacccuucaaucac

SEQ ID NO: 1743 - RNA, 19 nt, artificial
  RNA Oligomer
uaacaagucgaaauccuga

SEQ ID NO: 1744 - RNA, 19 nt, artificial
  RNA Oligomer
agaggagaagcgaccucua

SEQ ID NO: 1745 - RNA, 19 nt, artificial
  RNA Oligomer
agcuaguccaugagcaguu

SEQ ID NO: 1746 - RNA, 19 nt, artificial
  RNA Oligomer
ccuuccauaagccaucacc

SEQ ID NO: 1747 - RNA, 19 nt, artificial
  RNA Oligomer
aucgaugcccaagaagccu

SEQ ID NO: 1748 - RNA, 19 nt, artificial
  RNA Oligomer
agugaaccuuuggagcuua

SEQ ID NO: 1749 - RNA, 19 nt, artificial
  RNA Oligomer
acauugauuuaucuuggcc

SEQ ID NO: 1750 - RNA, 19 nt, artificial
  RNA Oligomer
aucuuuccaagcauuugaa

SEQ ID NO: 1751 - RNA, 19 nt, artificial
  RNA Oligomer
ggaugaauacaucuguccc

SEQ ID NO: 1752 - RNA, 19 nt, artificial
  RNA Oligomer
caggaaaccugaauaagcu

SEQ ID NO: 1753 - RNA, 19 nt, artificial
  RNA Oligomer
ugaucuacuuaguuggaau

SEQ ID NO: 1754 - RNA, 19 nt, artificial
  RNA Oligomer
ucauucucuaggcuguacu

SEQ ID NO: 1755 - RNA, 19 nt, artificial
  RNA Oligomer
auucucuaggcuguacuau

SEQ ID NO: 1756 - RNA, 19 nt, artificial
  RNA Oligomer
cuaggcuguacuauaaacc

SEQ ID NO: 1757 - RNA, 19 nt, artificial
  RNA Oligomer
cuguacuauaaaccauauc

SEQ ID NO: 1758 - RNA, 19 nt, artificial
  RNA Oligomer
uacuauaaaccauaucucc

SEQ ID NO: 1759 - RNA, 19 nt, artificial
  RNA Oligomer
acccuugacaauugggguu

SEQ ID NO: 1760 - RNA, 19 nt, artificial
  RNA Oligomer
uugggguuaaggagagaua

SEQ ID NO: 1761 - RNA, 19 nt, artificial
  RNA Oligomer
ugggguuaaggagagauac

SEQ ID NO: 1762 - RNA, 19 nt, artificial
  RNA Oligomer
auucccagaaaagcccaga

SEQ ID NO: 1763 - RNA, 19 nt, artificial
  RNA Oligomer
ugccauggugaaaugguuc

SEQ ID NO: 1764 - RNA, 19 nt, artificial
  RNA Oligomer
auacugaaaagaggauaga

SEQ ID NO: 1765 - RNA, 19 nt, artificial
  RNA Oligomer
gaguaaucaacuacacaca

SEQ ID NO: 1766 - RNA, 19 nt, artificial
  RNA Oligomer
acaguauucaacacuuaag

SEQ ID NO: 1767 - RNA, 19 nt, artificial
  RNA Oligomer
caguauucaacacuuaaga

SEQ ID NO: 1768 - RNA, 19 nt, artificial
  RNA Oligomer
aaauaggcaaaucugguuu

SEQ ID NO: 1769 - RNA, 19 nt, artificial
  RNA Oligomer
ugaaucacuucuccaaagg

SEQ ID NO: 1770 - RNA, 19 nt, artificial
  RNA Oligomer
aucacuucuccaaaggcca

SEQ ID NO: 1771 - RNA, 19 nt, artificial
  RNA Oligomer
agaaagaaaagagacuaca

SEQ ID NO: 1772 - RNA, 19 nt, artificial
  RNA Oligomer
uuugggguuucuuauuuag

SEQ ID NO: 1773 - RNA, 19 nt, artificial
  RNA Oligomer
guuucuuauuuagggcagg

SEQ ID NO: 1774 - RNA, 19 nt, artificial
  RNA Oligomer
caaucagugaguaaaguuu

SEQ ID NO: 1775 - RNA, 19 nt, artificial
  RNA Oligomer
cagugaguaaaguuuuuuc

SEQ ID NO: 1776 - RNA, 19 nt, artificial
  RNA Oligomer
ucuuaacaagucgaaaucc

SEQ ID NO: 1777 - RNA, 19 nt, artificial
  RNA Oligomer
uuaacaagucgaaauccug

SEQ ID NO: 1778 - RNA, 19 nt, artificial
  RNA Oligomer
uugcugcucaaacugccag

SEQ ID NO: 1779 - RNA, 19 nt, artificial
  RNA Oligomer
ugcugcucaaacugccagu

SEQ ID NO: 1780 - RNA, 19 nt, artificial
  RNA Oligomer
agaaucacacacaauccua

SEQ ID NO: 1781 - RNA, 19 nt, artificial
  RNA Oligomer
cacacacaauccuauccag

SEQ ID NO: 1782 - RNA, 19 nt, artificial
  RNA Oligomer
ucagggacaaggaccuuug

SEQ ID NO: 1783 - RNA, 19 nt, artificial
  RNA Oligomer
acaaggaccuuugagcaac

SEQ ID NO: 1784 - RNA, 19 nt, artificial
  RNA Oligomer
ccuuugagcaaccaaguuu

SEQ ID NO: 1785 - RNA, 19 nt, artificial
  RNA Oligomer
cuuccauaagccaucacca

SEQ ID NO: 1786 - RNA, 19 nt, artificial
  RNA Oligomer
agucaguggugacaacucc

SEQ ID NO: 1787 - RNA, 19 nt, artificial
  RNA Oligomer
uugcugaauugaacauugu

SEQ ID NO: 1788 - RNA, 19 nt, artificial
  RNA Oligomer
cuggcaaguugauuccuca

SEQ ID NO: 1789 - RNA, 19 nt, artificial
  RNA Oligomer
acuauaaaccauaucucca

SEQ ID NO: 1790 - RNA, 19 nt, artificial
  RNA Oligomer
auaaaccauaucuccauag

SEQ ID NO: 1791 - RNA, 19 nt, artificial
  RNA Oligomer
cuacccuugacaauugggg

SEQ ID NO: 1792 - RNA, 19 nt, artificial
  RNA Oligomer
cccuugacaauugggguua

SEQ ID NO: 1793 - RNA, 19 nt, artificial
  RNA Oligomer
agaggauagauuacuaagu

SEQ ID NO: 1794 - RNA, 19 nt, artificial
  RNA Oligomer
gaggauagauuacuaagug

SEQ ID NO: 1795 - RNA, 19 nt, artificial
  RNA Oligomer
aucucagaacuaauuuccu

SEQ ID NO: 1796 - RNA, 19 nt, artificial
  RNA Oligomer
uagagugaggaagucacca

SEQ ID NO: 1797 - RNA, 19 nt, artificial
  RNA Oligomer
uaccaagccuaccugaaac

SEQ ID NO: 1798 - RNA, 19 nt, artificial
  RNA Oligomer
ucuacuuuugcuuaccuau

SEQ ID NO: 1799 - RNA, 19 nt, artificial
  RNA Oligomer
acccuucaaucacuguugu

SEQ ID NO: 1800 - RNA, 19 nt, artificial
  RNA Oligomer
gcuaguccaugagcaguuc

SEQ ID NO: 1801 - RNA, 19 nt, artificial
  RNA Oligomer
aguucuccugcuuaaacac

SEQ ID NO: 1802 - RNA, 19 nt, artificial
  RNA Oligomer
uucucugggucaguuucuc

SEQ ID NO: 1803 - RNA, 19 nt, artificial
  RNA Oligomer
cuugcugaauugaacauug

SEQ ID NO: 1804 - RNA, 19 nt, artificial
  RNA Oligomer
aaaccauaucuccauagcc

SEQ ID NO: 1805 - RNA, 19 nt, artificial
  RNA Oligomer
cucagaacuaauuuccuau

SEQ ID NO: 1806 - RNA, 19 nt, artificial
  RNA Oligomer
ucagaacuaauuuccuauc

SEQ ID NO: 1807 - RNA, 19 nt, artificial
  RNA Oligomer
auaggcaaaucugguuuau

SEQ ID NO: 1808 - RNA, 19 nt, artificial
  RNA Oligomer
gacccuucaaucacuguug

SEQ ID NO: 1809 - RNA, 19 nt, artificial
  RNA Oligomer
aaggaccuuugagcaacca

SEQ ID NO: 1810 - RNA, 19 nt, artificial
  RNA Oligomer
aggaccuuugagcaaccaa

SEQ ID NO: 1811 - RNA, 19 nt, artificial
  RNA Oligomer
aucaccauuuuguaagcau

SEQ ID NO: 1812 - RNA, 19 nt, artificial
  RNA Oligomer
ucaguggugacaacuccag

SEQ ID NO: 1813 - RNA, 19 nt, artificial
  RNA Oligomer
acacagugaaccuuuggag

SEQ ID NO: 1814 - RNA, 19 nt, artificial
  RNA Oligomer
auuccucaaauauuaccuc

SEQ ID NO: 1815 - RNA, 19 nt, artificial
  RNA Oligomer
uccucaaauauuaccucgu

SEQ ID NO: 1816 - RNA, 19 nt, artificial
  RNA Oligomer
ucaaauuugagucaggaac

SEQ ID NO: 1817 - RNA, 19 nt, artificial
  RNA Oligomer
auccugagcugaggaucag

SEQ ID NO: 1818 - RNA, 19 nt, artificial
  RNA Oligomer
gauuccucaaauauuaccu

SEQ ID NO: 1819 - RNA, 19 nt, artificial
  RNA Oligomer
uuccucaaauauuaccucg

SEQ ID NO: 1820 - RNA, 19 nt, artificial
  RNA Oligomer
ggcuuuuggaaguuuugau

SEQ ID NO: 1821 - RNA, 19 nt, artificial
  RNA Oligomer
gcuuuuggaaguuuugaua

SEQ ID NO: 1822 - RNA, 19 nt, artificial
  RNA Oligomer
ccaaaggccagaaaaucag

SEQ ID NO: 1823 - RNA, 19 nt, artificial
  RNA Oligomer
uccugcuuaaacacaagug

SEQ ID NO: 1824 - RNA, 19 nt, artificial
  RNA Oligomer
ucaccauuuuguaagcaua

SEQ ID NO: 1825 - RNA, 19 nt, artificial
  RNA Oligomer
aggagagauacuucaauuc

SEQ ID NO: 1826 - RNA, 19 nt, artificial
  RNA Oligomer
uucaaauuugagucaggaa

SEQ ID NO: 1827 - RNA, 19 nt, artificial
  RNA Oligomer
ccucugaaaacuuagagaa

SEQ ID NO: 1828 - RNA, 19 nt, artificial
  RNA Oligomer
accuauuccaucccauuca

SEQ ID NO: 1829 - RNA, 19 nt, artificial
  RNA Oligomer
cacuauuuugaaucacuuc

SEQ ID NO: 1830 - RNA, 19 nt, artificial
  RNA Oligomer
ccuuuuuaggacccuucaa

SEQ ID NO: 1831 - RNA, 19 nt, artificial
  RNA Oligomer
guuuuuucuuaacaagucg

SEQ ID NO: 1832 - RNA, 19 nt, artificial
  RNA Oligomer
uucuccugcuuaaacacaa

SEQ ID NO: 1833 - RNA, 19 nt, artificial
  RNA Oligomer
ccugcuuaaacacaagugu

SEQ ID NO: 1834 - RNA, 19 nt, artificial
  RNA Oligomer
ugcuuaaacacaaguguaa

SEQ ID NO: 1835 - RNA, 19 nt, artificial
  RNA Oligomer
auucucugggucaguuucu

SEQ ID NO: 1836 - RNA, 19 nt, artificial
  RNA Oligomer
ugagauaacacugccaugg

SEQ ID NO: 1837 - RNA, 19 nt, artificial
  RNA Oligomer
cuuuuuaggacccuucaau

SEQ ID NO: 1838 - RNA, 19 nt, artificial
  RNA Oligomer
uucaaucacuguuguucca

SEQ ID NO: 1839 - RNA, 19 nt, artificial
  RNA Oligomer
ugcucaaacugccaguugc

SEQ ID NO: 1840 - RNA, 19 nt, artificial
  RNA Oligomer
ugauuccucaaauauuacc

SEQ ID NO: 1841 - RNA, 19 nt, artificial
  RNA Oligomer
cucugggucaguuucucag

SEQ ID NO: 1842 - RNA, 19 nt, artificial
  RNA Oligomer
uucccagaaaagcccagag

SEQ ID NO: 1843 - RNA, 19 nt, artificial
  RNA Oligomer
ucaaucacuguuguuccaa

SEQ ID NO: 1844 - RNA, 19 nt, artificial
  RNA Oligomer
agccuuccauaagccauca

SEQ ID NO: 1845 - RNA, 19 nt, artificial
  RNA Oligomer
gccuuccauaagccaucac

SEQ ID NO: 1846 - RNA, 19 nt, artificial
  RNA Oligomer
accauaucuccauagccaa

SEQ ID NO: 1847 - RNA, 19 nt, artificial
  RNA Oligomer
aaacacagaaagaaaagag

SEQ ID NO: 1848 - RNA, 19 nt, artificial
  RNA Oligomer
cuucaaucacuguuguucc

SEQ ID NO: 1849 - RNA, 19 nt, artificial
  RNA Oligomer
ucccagaaaagcccagaga

SEQ ID NO: 1850 - RNA, 19 nt, artificial
  RNA Oligomer
aacacagaaagaaaagaga

SEQ ID NO: 1851 - RNA, 19 nt, artificial
  RNA Oligomer
acacagaaagaaaagagac

SEQ ID NO: 1852 - RNA, 19 nt, artificial
  siRNA Oligomer
caguguucuaacaaacuaa

SEQ ID NO: 1853 - RNA, 19 nt, artificial
  siRNA Oligomer
ccaguguucuaacaaacua

SEQ ID NO: 1854 - RNA, 19 nt, artificial
  siRNA Oligomer
ggcuuuucugggaauugaa

SEQ ID NO: 1855 - RNA, 19 nt, artificial
  siRNA Oligomer
cgugaacuuggaaauugaa

SEQ ID NO: 1856 - RNA, 19 nt, artificial
  siRNA Oligomer
ggauggaauagguaagcaa

SEQ ID NO: 1857 - RNA, 19 nt, artificial
  siRNA Oligomer
uagccaguguucuaacaaa

SEQ ID NO: 1858 - RNA, 19 nt, artificial
  siRNA Oligomer
gauugaaggguccuaaaaa

SEQ ID NO: 1859 - RNA, 19 nt, artificial
  siRNA Oligomer
agaauugggccaagauaaa

SEQ ID NO: 1860 - RNA, 19 nt, artificial
  siRNA Oligomer
ugcugugggucguggauaa

SEQ ID NO: 1861 - RNA, 19 nt, artificial
  siRNA Oligomer
agguaagaguaaaugagaa

SEQ ID NO: 1862 - RNA, 19 nt, artificial
  siRNA Oligomer
cuguccaaaucaaagcaaa

SEQ ID NO: 1863 - RNA, 19 nt, artificial
  siRNA Oligomer
ucaugauuggguaguaaaa

SEQ ID NO: 1864 - RNA, 19 nt, artificial
  siRNA Oligomer
gccaguguucuaacaaacu

SEQ ID NO: 1865 - RNA, 19 nt, artificial
  siRNA Oligomer
gugauugaaggguccuaaa

SEQ ID NO: 1866 - RNA, 19 nt, artificial
  siRNA Oligomer
ggaaggcuguuaaauuaau

SEQ ID NO: 1867 - RNA, 19 nt, artificial
  siRNA Oligomer
gcuuauggaaggcuguuaa

SEQ ID NO: 1868 - RNA, 19 nt, artificial
  siRNA Oligomer
uccuguuacugauacuaua

SEQ ID NO: 1869 - RNA, 19 nt, artificial
  siRNA Oligomer
gguccuugucccugagaaa

SEQ ID NO: 1870 - RNA, 19 nt, artificial
  siRNA Oligomer
ugguuaaaaugcuggagaa

SEQ ID NO: 1871 - RNA, 19 nt, artificial
  siRNA Oligomer
ccauugagugaaugaugaa

SEQ ID NO: 1872 - RNA, 19 nt, artificial
  siRNA Oligomer
caggauuucgacuuguuaa

SEQ ID NO: 1873 - RNA, 19 nt, artificial
  siRNA Oligomer
acgugaacuuggaaauuga

SEQ ID NO: 1874 - RNA, 19 nt, artificial
  siRNA Oligomer
gugugauccuguuacugau

SEQ ID NO: 1875 - RNA, 19 nt, artificial
  siRNA Oligomer
cgagguaauauuugaggaa

SEQ ID NO: 1876 - RNA, 19 nt, artificial
  siRNA Oligomer
gcuuggaaagauacuacaa

SEQ ID NO: 1877 - RNA, 19 nt, artificial
  siRNA Oligomer
cuaaaaugucacuguucaa

SEQ ID NO: 1878 - RNA, 19 nt, artificial
  siRNA Oligomer
gugacuuccucacucuaau

SEQ ID NO: 1879 - RNA, 19 nt, artificial
  siRNA Oligomer
gccuguuaugcuuacaaaa

SEQ ID NO: 1880 - RNA, 19 nt, artificial
  siRNA Oligomer
agguaggcuugguaauaga

SEQ ID NO: 1881 - RNA, 19 nt, artificial
  siRNA Oligomer
gaugaauaccugugaggau

SEQ ID NO: 1882 - RNA, 19 nt, artificial
  siRNA Oligomer
cugucacuagggaauaaua

SEQ ID NO: 1883 - RNA, 19 nt, artificial
  siRNA Oligomer
guuuuaaagaggcaacaaa

SEQ ID NO: 1884 - RNA, 19 nt, artificial
  siRNA Oligomer
guguucuaacaaacuaaac

SEQ ID NO: 1885 - RNA, 19 nt, artificial
  siRNA Oligomer
gcuugguaauagacuauau

SEQ ID NO: 1886 - RNA, 19 nt, artificial
  siRNA Oligomer
cauccugguguuacugaaa

SEQ ID NO: 1887 - RNA, 19 nt, artificial
  siRNA Oligomer
gccuaucaaaacuuccaaa

SEQ ID NO: 1888 - RNA, 19 nt, artificial
  siRNA Oligomer
uccugguguuacugaaaaa

SEQ ID NO: 1889 - RNA, 19 nt, artificial
  siRNA Oligomer
ccacgguguuguuuuagau

SEQ ID NO: 1890 - RNA, 19 nt, artificial
  siRNA Oligomer
gcaguuugagcagcaagaa

SEQ ID NO: 1891 - RNA, 19 nt, artificial
  siRNA Oligomer
cuuggaaagauacuacaaa

SEQ ID NO: 1892 - RNA, 19 nt, artificial
  siRNA Oligomer
gugugauucuagcgucgua

SEQ ID NO: 1893 - RNA, 19 nt, artificial
  siRNA Oligomer
cuugggcaucgauguagaa

SEQ ID NO: 1894 - RNA, 19 nt, artificial
  siRNA Oligomer
gggcuuuucugggaauuga

SEQ ID NO: 1895 - RNA, 19 nt, artificial
  siRNA Oligomer
aacugucuguccaaaucaa

SEQ ID NO: 1896 - RNA, 19 nt, artificial
  siRNA Oligomer
agccaguguucuaacaaac

SEQ ID NO: 1897 - RNA, 19 nt, artificial
  siRNA Oligomer
gaaggguccuaaaaaggga

SEQ ID NO: 1898 - RNA, 19 nt, artificial
  siRNA Oligomer
aaagcuuaacccuagguaa

SEQ ID NO: 1899 - RNA, 19 nt, artificial
  siRNA Oligomer
acaugugcuuaaucucaga

SEQ ID NO: 1900 - RNA, 19 nt, artificial
  siRNA Oligomer
uccucacucuaauguuuua

SEQ ID NO: 1901 - RNA, 19 nt, artificial
  siRNA Oligomer
gaaagauacuacaaagcca

SEQ ID NO: 1902 - RNA, 19 nt, artificial
  siRNA Oligomer
aaggguuuuuagacaggaa

SEQ ID NO: 1903 - RNA, 19 nt, artificial
  siRNA Oligomer
ucauccugguguuacugaa

SEQ ID NO: 1904 - RNA, 19 nt, artificial
  siRNA Oligomer
ccuguuacugauacuauaa

SEQ ID NO: 1905 - RNA, 19 nt, artificial
  siRNA Oligomer
cauagaucccauuuuugua

SEQ ID NO: 1906 - RNA, 19 nt, artificial
  siRNA Oligomer
aauugaaugggauggaaua

SEQ ID NO: 1907 - RNA, 19 nt, artificial
  siRNA Oligomer
cugugaggauaggaaauua

SEQ ID NO: 1908 - RNA, 19 nt, artificial
  siRNA Oligomer
ccuagguaagaguaaauga

SEQ ID NO: 1909 - RNA, 19 nt, artificial
  siRNA Oligomer
cguggauaaggagcuuauu

SEQ ID NO: 1910 - RNA, 19 nt, artificial
  siRNA Oligomer
ccagauuugccuauuuuga

SEQ ID NO: 1911 - RNA, 19 nt, artificial
  siRNA Oligomer
uuggagaagugauucaaaa

SEQ ID NO: 1912 - RNA, 19 nt, artificial
  siRNA Oligomer
gaggaaucaacuugccaga

SEQ ID NO: 1913 - RNA, 19 nt, artificial
  siRNA Oligomer
gagaaauauuacggcaaua

SEQ ID NO: 1914 - RNA, 19 nt, artificial
  siRNA Oligomer
agaauugaaugggauggaa

SEQ ID NO: 1915 - RNA, 19 nt, artificial
  siRNA Oligomer
auggaauagguaagcaaaa

SEQ ID NO: 1916 - RNA, 19 nt, artificial
  siRNA Oligomer
guaaaaagcuggauaggau

SEQ ID NO: 1917 - RNA, 19 nt, artificial
  siRNA Oligomer
ccaccaguuccugacucaa

SEQ ID NO: 1918 - RNA, 19 nt, artificial
  siRNA Oligomer
caaauuagccaguguucua

SEQ ID NO: 1919 - RNA, 19 nt, artificial
  siRNA Oligomer
cucacugauuggaacaaca

SEQ ID NO: 1920 - RNA, 19 nt, artificial
  siRNA Oligomer
uggagaacugucuguccaa

SEQ ID NO: 1921 - RNA, 19 nt, artificial
  siRNA Oligomer
uagaauugggccaagauaa

SEQ ID NO: 1922 - RNA, 19 nt, artificial
  siRNA Oligomer
cucuucaaaugcuuggaaa

SEQ ID NO: 1923 - RNA, 19 nt, artificial
  siRNA Oligomer
ugugggucguggauaagga

SEQ ID NO: 1924 - RNA, 19 nt, artificial
  siRNA Oligomer
ccuaaaaugucacuguuca

SEQ ID NO: 1925 - RNA, 19 nt, artificial
  siRNA Oligomer
ugauugaaggguccuaaaa

SEQ ID NO: 1926 - RNA, 19 nt, artificial
  siRNA Oligomer
gagaaacugacccagagaa

SEQ ID NO: 1927 - RNA, 19 nt, artificial
  siRNA Oligomer
caccaguuccugacucaaa

SEQ ID NO: 1928 - RNA, 19 nt, artificial
  siRNA Oligomer
caaagguccuugucccuga

SEQ ID NO: 1929 - RNA, 19 nt, artificial
  siRNA Oligomer
gagugaaugaugaauaccu

SEQ ID NO: 1930 - RNA, 19 nt, artificial
  siRNA Oligomer
caauaauggaacugcuuca

SEQ ID NO: 1931 - RNA, 19 nt, artificial
  siRNA Oligomer
cacuaacaguuaucuuuga

SEQ ID NO: 1932 - RNA, 19 nt, artificial
  siRNA Oligomer
gcgucguaccuacuuuuga

SEQ ID NO: 1933 - RNA, 19 nt, artificial
  siRNA Oligomer
cggccagcauuucagaauu

SEQ ID NO: 1934 - RNA, 19 nt, artificial
  siRNA Oligomer
gugcuuaaucucagaugaa

SEQ ID NO: 1935 - RNA, 19 nt, artificial
  siRNA Oligomer
guuguguuaugcacgugaa

SEQ ID NO: 1936 - RNA, 19 nt, artificial
  siRNA Oligomer
aguacagccuagagaauga

SEQ ID NO: 1937 - RNA, 19 nt, artificial
  siRNA Oligomer
acugucuguccaaaucaaa

SEQ ID NO: 1938 - RNA, 19 nt, artificial
  siRNA Oligomer
agcuuacacuuguguuuaa

SEQ ID NO: 1939 - RNA, 19 nt, artificial
  siRNA Oligomer
gauuggguaguaaaacuau

SEQ ID NO: 1940 - RNA, 19 nt, artificial
  siRNA Oligomer
gugaacuuggaaauugaaa

SEQ ID NO: 1941 - RNA, 19 nt, artificial
  siRNA Oligomer
gccagaauuugguuaaaau

SEQ ID NO: 1942 - RNA, 19 nt, artificial
  siRNA Oligomer
cuggcaguuugagcagcaa

SEQ ID NO: 1943 - RNA, 19 nt, artificial
  siRNA Oligomer
gaauugaaugggauggaau

SEQ ID NO: 1944 - RNA, 19 nt, artificial
  siRNA Oligomer
gucacuagggaauaauaaa

SEQ ID NO: 1945 - RNA, 19 nt, artificial
  siRNA Oligomer
agaucuagucccucucuga

SEQ ID NO: 1946 - RNA, 19 nt, artificial
  siRNA Oligomer
ucuugggcaucgauguaga

SEQ ID NO: 1947 - RNA, 19 nt, artificial
  siRNA Oligomer
ccagagaauugcucaagau

SEQ ID NO: 1948 - RNA, 19 nt, artificial
  siRNA Oligomer
cccuguucuuaaguguuga

SEQ ID NO: 1949 - RNA, 19 nt, artificial
  siRNA Oligomer
gacccagagaauugcucaa

SEQ ID NO: 1950 - RNA, 19 nt, artificial
  siRNA Oligomer
uuuggagaagugauucaaa

SEQ ID NO: 1951 - RNA, 19 nt, artificial
  siRNA Oligomer
gugaaugaugaauaccugu

SEQ ID NO: 1952 - RNA, 19 nt, artificial
  siRNA Oligomer
ucaggauuucgacuuguua

SEQ ID NO: 1953 - RNA, 19 nt, artificial
  siRNA Oligomer
agugaaugaugaauaccug

SEQ ID NO: 1954 - RNA, 19 nt, artificial
  siRNA Oligomer
gacaggaagguaggauuaa

SEQ ID NO: 1955 - RNA, 19 nt, artificial
  siRNA Oligomer
ggguccuaaaaagggaaaa

SEQ ID NO: 1956 - RNA, 19 nt, artificial
  siRNA Oligomer
ggauaaggagcuuauucag

SEQ ID NO: 1957 - RNA, 19 nt, artificial
  siRNA Oligomer
cuuauggaaggcuguuaaa

SEQ ID NO: 1958 - RNA, 19 nt, artificial
  siRNA Oligomer
cgaaggaaacagagccguu

SEQ ID NO: 1959 - RNA, 19 nt, artificial
  siRNA Oligomer
guucuaacaaacuaaacuc

SEQ ID NO: 1960 - RNA, 19 nt, artificial
  siRNA Oligomer
aaugggauggaauagguaa

SEQ ID NO: 1961 - RNA, 19 nt, artificial
  siRNA Oligomer
ccuguucuuaaguguugaa

SEQ ID NO: 1962 - RNA, 19 nt, artificial
  siRNA Oligomer
ggccuuauuuuuugucuua

SEQ ID NO: 1963 - RNA, 19 nt, artificial
  siRNA Oligomer
cucucugauucacuuagua

SEQ ID NO: 1964 - RNA, 19 nt, artificial
  siRNA Oligomer
ggcaguuugagcagcaaga

SEQ ID NO: 1965 - RNA, 19 nt, artificial
  siRNA Oligomer
cgucguaccuacuuuugag

SEQ ID NO: 1966 - RNA, 19 nt, artificial
  siRNA Oligomer
gaaugaaacucaccgucca

SEQ ID NO: 1967 - RNA, 19 nt, artificial
  siRNA Oligomer
gucuauuguuaagcuccaa

SEQ ID NO: 1968 - RNA, 19 nt, artificial
  siRNA Oligomer
caaccucaacgagguaaua

SEQ ID NO: 1969 - RNA, 19 nt, artificial
  siRNA Oligomer
uaggcuugguaauagacua

SEQ ID NO: 1970 - RNA, 19 nt, artificial
  siRNA Oligomer
guauguaaaaagcuggaua

SEQ ID NO: 1971 - RNA, 19 nt, artificial
  siRNA Oligomer
guugcaacuggcaguuuga

SEQ ID NO: 1972 - RNA, 19 nt, artificial
  siRNA Oligomer
ccuagagaaugaaacucac

SEQ ID NO: 1973 - RNA, 19 nt, artificial
  siRNA Oligomer
gccugcuaagugauuuuga

SEQ ID NO: 1974 - RNA, 19 nt, artificial
  siRNA Oligomer
cuauuagcuccacuucaca

SEQ ID NO: 1975 - RNA, 19 nt, artificial
  siRNA Oligomer
agugauugaaggguccuaa

SEQ ID NO: 1976 - RNA, 19 nt, artificial
  siRNA Oligomer
ggguaguagcuguauacua

SEQ ID NO: 1977 - RNA, 19 nt, artificial
  siRNA Oligomer
uguuguuuugcaugucuau

SEQ ID NO: 1978 - RNA, 19 nt, artificial
  siRNA Oligomer
guuccugacucaaauuuga

SEQ ID NO: 1979 - RNA, 19 nt, artificial
  siRNA Oligomer
caguaaccacgguguuguu

SEQ ID NO: 1980 - RNA, 19 nt, artificial
  siRNA Oligomer
agauuuuuuccaccuugga

SEQ ID NO: 1981 - RNA, 19 nt, artificial
  siRNA Oligomer
cccagagaauugcucaaga

SEQ ID NO: 1982 - RNA, 19 nt, artificial
  siRNA Oligomer
cagauuugccuauuuugau

SEQ ID NO: 1983 - RNA, 19 nt, artificial
  siRNA Oligomer
uggaaggcuguuaaauuaa

SEQ ID NO: 1984 - RNA, 19 nt, artificial
  siRNA Oligomer
uauaguacagccuagagaa

SEQ ID NO: 1985 - RNA, 19 nt, artificial
  siRNA Oligomer
gguuguguuaugcacguga

SEQ ID NO: 1986 - RNA, 19 nt, artificial
  siRNA Oligomer
gauaccugucacuagggaa

SEQ ID NO: 1987 - RNA, 19 nt, artificial
  siRNA Oligomer
ccuaucaaaacuuccaaaa

SEQ ID NO: 1988 - RNA, 19 nt, artificial
  siRNA Oligomer
gcguagggacagauguauu

SEQ ID NO: 1989 - RNA, 19 nt, artificial
  siRNA Oligomer
gauacuauaagugaccuaa

SEQ ID NO: 1990 - RNA, 19 nt, artificial
  siRNA Oligomer
cgaagucugcauuggcuau

SEQ ID NO: 1991 - RNA, 19 nt, artificial
  siRNA Oligomer
ggauaggauugugugugau

SEQ ID NO: 1992 - RNA, 19 nt, artificial
  siRNA Oligomer
ggccuuuggagaagugauu

SEQ ID NO: 1993 - RNA, 19 nt, artificial
  siRNA Oligomer
auagguaagcaaaaguaga

SEQ ID NO: 1994 - RNA, 19 nt, artificial
  siRNA Oligomer
gguaggauuaaguagguga

SEQ ID NO: 1995 - RNA, 19 nt, artificial
  siRNA Oligomer
gauuaaguaggugaguuua

SEQ ID NO: 1996 - RNA, 19 nt, artificial
  siRNA Oligomer
aggaagguaggauuaagua

SEQ ID NO: 1997 - RNA, 19 nt, artificial
  siRNA Oligomer
ggugugauccuguuacuga

SEQ ID NO: 1998 - RNA, 19 nt, artificial
  siRNA Oligomer
cauggacuagcuucaggga

SEQ ID NO: 1999 - RNA, 19 nt, artificial
  siRNA Oligomer
gaaggguuuuuagacagga

SEQ ID NO: 2000 - RNA, 19 nt, artificial
  siRNA Oligomer
cuuuggagaagugauucaa

SEQ ID NO: 2001 - RNA, 19 nt, artificial
  siRNA Oligomer
uggagaagugauucaaaau

SEQ ID NO: 2002 - RNA, 19 nt, artificial
  siRNA Oligomer
cagugauugaaggguccua

SEQ ID NO: 2003 - RNA, 19 nt, artificial
  siRNA Oligomer
uguacagaauugaauggga

SEQ ID NO: 2004 - RNA, 19 nt, artificial
  siRNA Oligomer
ucaacgagguaauauuuga

SEQ ID NO: 2005 - RNA, 19 nt, artificial
  siRNA Oligomer
cucugggcuuuucugggaa

SEQ ID NO: 2006 - RNA, 19 nt, artificial
  siRNA Oligomer
ggcuugcgagguuguguua

SEQ ID NO: 2007 - RNA, 19 nt, artificial
  siRNA Oligomer
cggcaauaauggaacugcu

SEQ ID NO: 2008 - RNA, 19 nt, artificial
  siRNA Oligomer
cuuuacucacugauuggaa

SEQ ID NO: 2009 - RNA, 19 nt, artificial
  siRNA Oligomer
ggacuuuuucuuuaguaga

SEQ ID NO: 2010 - RNA, 19 nt, artificial
  siRNA Oligomer
cucugauucacuuaguaau

SEQ ID NO: 2011 - RNA, 19 nt, artificial
  siRNA Oligomer
guacagaauugaaugggau

SEQ ID NO: 2012 - RNA, 19 nt, artificial
  siRNA Oligomer
gggaauaauaaaggccuua

SEQ ID NO: 2013 - RNA, 19 nt, artificial
  siRNA Oligomer
uaccugugaggauaggaaa

SEQ ID NO: 2014 - RNA, 19 nt, artificial
  siRNA Oligomer
ggauaccugucacuaggga

SEQ ID NO: 2015 - RNA, 19 nt, artificial
  siRNA Oligomer
cuagcuucagggacuuuuu

SEQ ID NO: 2016 - RNA, 19 nt, artificial
  siRNA Oligomer
aaagauacuacaaagccaa

SEQ ID NO: 2017 - RNA, 19 nt, artificial
  siRNA Oligomer
uguggugccauuucaguaa

SEQ ID NO: 2018 - RNA, 19 nt, artificial
  siRNA Oligomer
auagaauugggccaagaua

SEQ ID NO: 2019 - RNA, 19 nt, artificial
  siRNA Oligomer
guuucagguaggcuuggua

SEQ ID NO: 2020 - RNA, 19 nt, artificial
  siRNA Oligomer
ggucguggauaaggagcuu

SEQ ID NO: 2021 - RNA, 19 nt, artificial
  siRNA Oligomer
aauggugauggcuuaugga

SEQ ID NO: 2022 - RNA, 19 nt, artificial
  siRNA Oligomer
gcuuguggugccauuucag

SEQ ID NO: 2023 - RNA, 19 nt, artificial
  siRNA Oligomer
ugugcuuaaucucagauga

SEQ ID NO: 2024 - RNA, 19 nt, artificial
  siRNA Oligomer
uagguaagcaaaaguagaa

SEQ ID NO: 2025 - RNA, 19 nt, artificial
  siRNA Oligomer
ugauuuucuggccuuugga

SEQ ID NO: 2026 - RNA, 19 nt, artificial
  siRNA Oligomer
gcuucuugggcaucgaugu

SEQ ID NO: 2027 - RNA, 19 nt, artificial
  siRNA Oligomer
ccguccagauaaccaugca

SEQ ID NO: 2028 - RNA, 19 nt, artificial
  siRNA Oligomer
aaccaugcaugcacccaga

SEQ ID NO: 2029 - RNA, 19 nt, artificial
  siRNA Oligomer
caggaagguaggauuaagu

SEQ ID NO: 2030 - RNA, 19 nt, artificial
  siRNA Oligomer
gaauugggccaagauaaau

SEQ ID NO: 2031 - RNA, 19 nt, artificial
  siRNA Oligomer
gugaggauaggaaauuagu

SEQ ID NO: 2032 - RNA, 19 nt, artificial
  siRNA Oligomer
gauuuuuuccaccuuggau

SEQ ID NO: 2033 - RNA, 19 nt, artificial
  siRNA Oligomer
gcaugcacccagauuuuuu

SEQ ID NO: 2034 - RNA, 19 nt, artificial
  siRNA Oligomer
ccugcuaagugauuuugac

SEQ ID NO: 2035 - RNA, 19 nt, artificial
  siRNA Oligomer
gggauuauguuguuccuga

SEQ ID NO: 2036 - RNA, 19 nt, artificial
  siRNA Oligomer
ugccuguuaugcuuacaaa

SEQ ID NO: 2037 - RNA, 19 nt, artificial
  siRNA Oligomer
ccaccuuggauaccuguca

SEQ ID NO: 2038 - RNA, 19 nt, artificial
  siRNA Oligomer
uggccuuuggagaagugau

SEQ ID NO: 2039 - RNA, 19 nt, artificial
  siRNA Oligomer
cugcauagaucccauuuuu

SEQ ID NO: 2040 - RNA, 19 nt, artificial
  siRNA Oligomer
ccaaccucaacgagguaau

SEQ ID NO: 2041 - RNA, 19 nt, artificial
  siRNA Oligomer
agaaacugacccagagaau

SEQ ID NO: 2042 - RNA, 19 nt, artificial
  siRNA Oligomer
uggugacuuccucacucua

SEQ ID NO: 2043 - RNA, 19 nt, artificial
  siRNA Oligomer
agggaauaauaaaggccuu

SEQ ID NO: 2044 - RNA, 19 nt, artificial
  siRNA Oligomer
ccuguuaugcuuacaaaau

SEQ ID NO: 2045 - RNA, 19 nt, artificial
  siRNA Oligomer
aaaguagaagcccauuuga

SEQ ID NO: 2046 - RNA, 19 nt, artificial
  siRNA Oligomer
gauuuugacuacugggauu

SEQ ID NO: 2047 - RNA, 19 nt, artificial
  siRNA Oligomer
ggcuuauggaaggcuguua

SEQ ID NO: 2048 - RNA, 19 nt, artificial
  siRNA Oligomer
uguuguccuuuuuccacua

SEQ ID NO: 2049 - RNA, 19 nt, artificial
  siRNA Oligomer
ggcguagggacagauguau

SEQ ID NO: 2050 - RNA, 19 nt, artificial
  siRNA Oligomer
aguguagauuuucugcaua

SEQ ID NO: 2051 - RNA, 19 nt, artificial
  siRNA Oligomer
ccuuggauaccugucacua

SEQ ID NO: 2052 - RNA, 19 nt, artificial
  siRNA Oligomer
ccagauuuuuuccaccuug

SEQ ID NO: 2053 - RNA, 19 nt, artificial
  siRNA Oligomer
uagguaagaguaaaugaga

SEQ ID NO: 2054 - RNA, 19 nt, artificial
  siRNA Oligomer
accugcccuaaauaagaaa

SEQ ID NO: 2055 - RNA, 19 nt, artificial
  siRNA Oligomer
ugaggauaggaaauuaguu

SEQ ID NO: 2056 - RNA, 19 nt, artificial
  siRNA Oligomer
ggcuuuuuuuucucuaagu

SEQ ID NO: 2057 - RNA, 19 nt, artificial
  siRNA Oligomer
aaggguccuaaaaagggaa

SEQ ID NO: 2058 - RNA, 19 nt, artificial
  siRNA Oligomer
uaugcacgugaacuuggaa

SEQ ID NO: 2059 - RNA, 19 nt, artificial
  siRNA Oligomer
ggcuugguaauagacuaua

SEQ ID NO: 2060 - RNA, 19 nt, artificial
  siRNA Oligomer
cguugaccaugguugcaac

SEQ ID NO: 2061 - RNA, 19 nt, artificial
  siRNA Oligomer
ugucuauuguuaagcucca

SEQ ID NO: 2062 - RNA, 19 nt, artificial
  siRNA Oligomer
gcauagaucccauuuuugu

SEQ ID NO: 2063 - RNA, 19 nt, artificial
  siRNA Oligomer
caauuuacgaagucugcau

SEQ ID NO: 2064 - RNA, 19 nt, artificial
  siRNA Oligomer
ggaauagguaagcaaaagu

SEQ ID NO: 2065 - RNA, 19 nt, artificial
  siRNA Oligomer
ucagcuaaagucauuugua

SEQ ID NO: 2066 - RNA, 19 nt, artificial
  siRNA Oligomer
gcuggauaggauugugugu

SEQ ID NO: 2067 - RNA, 19 nt, artificial
  siRNA Oligomer
ggaagguaggauuaaguag

SEQ ID NO: 2068 - RNA, 19 nt, artificial
  siRNA Oligomer
guacagccuagagaaugaa

SEQ ID NO: 2069 - RNA, 19 nt, artificial
  siRNA Oligomer
gauucuagcgucguaccua

SEQ ID NO: 2070 - RNA, 19 nt, artificial
  siRNA Oligomer
gaucuagucccucucugau

SEQ ID NO: 2071 - RNA, 19 nt, artificial
  siRNA Oligomer
gacucaaauuugaaggguu

SEQ ID NO: 2072 - RNA, 19 nt, artificial
  siRNA Oligomer
uccacucaacaauguucaa

SEQ ID NO: 2073 - RNA, 19 nt, artificial
  siRNA Oligomer
uguagauuuucugcauaga

SEQ ID NO: 2074 - RNA, 19 nt, artificial
  siRNA Oligomer
ucguggauaaggagcuuau

SEQ ID NO: 2075 - RNA, 19 nt, artificial
  siRNA Oligomer
uggagauaugguuuauagu

SEQ ID NO: 2076 - RNA, 19 nt, artificial
  siRNA Oligomer
guauacuaccacuuugaau

SEQ ID NO: 2077 - RNA, 19 nt, artificial
  siRNA Oligomer
ccguugaccaugguugcaa

SEQ ID NO: 2078 - RNA, 19 nt, artificial
  siRNA Oligomer
gggauggaauagguaagca

SEQ ID NO: 2079 - RNA, 19 nt, artificial
  siRNA Oligomer
gaauuauugaaacggguca

SEQ ID NO: 2080 - RNA, 19 nt, artificial
  siRNA Oligomer
cuauggagauaugguuuau

SEQ ID NO: 2081 - RNA, 19 nt, artificial
  siRNA Oligomer
ccuuuggagaagugauuca

SEQ ID NO: 2082 - RNA, 19 nt, artificial
  siRNA Oligomer
agcccauuugaguuuuaca

SEQ ID NO: 2083 - RNA, 19 nt, artificial
  siRNA Oligomer
aggauugugugugauucua

SEQ ID NO: 2084 - RNA, 19 nt, artificial
  siRNA Oligomer
ugcuuggaaagauacuaca

SEQ ID NO: 2085 - RNA, 19 nt, artificial
  siRNA Oligomer
accaguuccugacucaaau

SEQ ID NO: 2086 - RNA, 19 nt, artificial
  siRNA Oligomer
ggcuauggagauaugguuu

SEQ ID NO: 2087 - RNA, 19 nt, artificial
  siRNA Oligomer
cuuuuuccacuaacaguua

SEQ ID NO: 2088 - RNA, 19 nt, artificial
  siRNA Oligomer
cccagauuuuuuccaccuu

SEQ ID NO: 2089 - RNA, 19 nt, artificial
  siRNA Oligomer
gguccuaaaaagggaaaau

SEQ ID NO: 2090 - RNA, 19 nt, artificial
  siRNA Oligomer
gcuucagggacuuuuucuu

SEQ ID NO: 2091 - RNA, 19 nt, artificial
  siRNA Oligomer
uguuuuaaagaggcaacaa

SEQ ID NO: 2092 - RNA, 19 nt, artificial
  siRNA Oligomer
ggaauaauaaaggccuuau

SEQ ID NO: 2093 - RNA, 19 nt, artificial
  siRNA Oligomer
gcaugucuauuguuaagcu

SEQ ID NO: 2094 - RNA, 19 nt, artificial
  siRNA Oligomer
agguccuugucccugagaa

SEQ ID NO: 2095 - RNA, 19 nt, artificial
  siRNA Oligomer
ugaugaauaccugugagga

SEQ ID NO: 2096 - RNA, 19 nt, artificial
  siRNA Oligomer
cuguauacuaccacuuuga

SEQ ID NO: 2097 - RNA, 19 nt, artificial
  siRNA Oligomer
guagauuuucugcauagau

SEQ ID NO: 2098 - RNA, 19 nt, artificial
  siRNA Oligomer
uuaugcacgugaacuugga

SEQ ID NO: 2099 - RNA, 19 nt, artificial
  siRNA Oligomer
gaaacugacccagagaauu

SEQ ID NO: 2100 - RNA, 19 nt, artificial
  siRNA Oligomer
ccaguuccugacucaaauu

SEQ ID NO: 2101 - RNA, 19 nt, artificial
  siRNA Oligomer
gaaacagagccguugacca

SEQ ID NO: 2102 - RNA, 19 nt, artificial
  siRNA Oligomer
gagaacugucuguccaaau

SEQ ID NO: 2103 - RNA, 19 nt, artificial
  siRNA Oligomer
ugucacuagggaauaauaa

SEQ ID NO: 2104 - RNA, 19 nt, artificial
  siRNA Oligomer
cauugagugaaugaugaau

SEQ ID NO: 2105 - RNA, 19 nt, artificial
  siRNA Oligomer
uacagccuagagaaugaaa

SEQ ID NO: 2106 - RNA, 19 nt, artificial
  siRNA Oligomer
ggagaacucugauccucag

SEQ ID NO: 2107 - RNA, 19 nt, artificial
  siRNA Oligomer
acgagguaauauuugagga

SEQ ID NO: 2108 - RNA, 19 nt, artificial
  siRNA Oligomer
cagggacuuuuucuuuagu

SEQ ID NO: 2109 - RNA, 19 nt, artificial
  siRNA Oligomer
aguugauuacucuuccauu

SEQ ID NO: 2110 - RNA, 19 nt, artificial
  siRNA Oligomer
ggaacaacagugauugaag

SEQ ID NO: 2111 - RNA, 19 nt, artificial
  siRNA Oligomer
aaggaaacagagccguuga

SEQ ID NO: 2112 - RNA, 19 nt, artificial
  siRNA Oligomer
caaagccaaucuuuauaga

SEQ ID NO: 2113 - RNA, 19 nt, artificial
  siRNA Oligomer
aaacgggucaauuuacgaa

SEQ ID NO: 2114 - RNA, 19 nt, artificial
  siRNA Oligomer
aaggcuucuugggcaucga

SEQ ID NO: 2115 - RNA, 19 nt, artificial
  siRNA Oligomer
ccugagaaacugacccaga

SEQ ID NO: 2116 - RNA, 19 nt, artificial
  siRNA Oligomer
cugcauuggcuauggagau

SEQ ID NO: 2117 - RNA, 19 nt, artificial
  siRNA Oligomer
gauugugugugauucuagc

SEQ ID NO: 2118 - RNA, 19 nt, artificial
  siRNA Oligomer
gcuagucagcuaaagucau

SEQ ID NO: 2119 - RNA, 19 nt, artificial
  siRNA Oligomer
uauucauccugguguuacu

SEQ ID NO: 2120 - RNA, 19 nt, artificial
  siRNA Oligomer
ggguaguaaaacuauucag

SEQ ID NO: 2121 - RNA, 19 nt, artificial
  siRNA Oligomer
accacgguguuguuuuaga

SEQ ID NO: 2122 - RNA, 19 nt, artificial
  siRNA Oligomer
caguuaucuuugacucucu

SEQ ID NO: 2123 - RNA, 19 nt, artificial
  siRNA Oligomer
cacaauuugguuucaggua

SEQ ID NO: 2124 - RNA, 19 nt, artificial
  siRNA Oligomer
ugauuggguaguaaaacua

SEQ ID NO: 2125 - RNA, 19 nt, artificial
  siRNA Oligomer
cuucuugggcaucgaugua

SEQ ID NO: 2126 - RNA, 19 nt, artificial
  siRNA Oligomer
gcuuuucugggaauugaag

SEQ ID NO: 2127 - RNA, 19 nt, artificial
  siRNA Oligomer
ggauugugugugauucuag

SEQ ID NO: 2128 - RNA, 19 nt, artificial
  siRNA Oligomer
agucugcauuggcuaugga

SEQ ID NO: 2129 - RNA, 19 nt, artificial
  siRNA Oligomer
acuacaaagccaaucuuua

SEQ ID NO: 2130 - RNA, 19 nt, artificial
  siRNA Oligomer
uaguguagauuuucugcau

SEQ ID NO: 2131 - RNA, 19 nt, artificial
  siRNA Oligomer
gcaaaaguagaagcccauu

SEQ ID NO: 2132 - RNA, 19 nt, artificial
  siRNA Oligomer
gggucaauuuacgaagucu

SEQ ID NO: 2133 - RNA, 19 nt, artificial
  siRNA Oligomer
aggcuucuugggcaucgau

SEQ ID NO: 2134 - RNA, 19 nt, artificial
  siRNA Oligomer
ugauuggaacaacagugau

SEQ ID NO: 2135 - RNA, 19 nt, artificial
  siRNA Oligomer
aauucagcaaggcuuucau

SEQ ID NO: 2136 - RNA, 19 nt, artificial
  siRNA Oligomer
aaugaugaauaccugugag

SEQ ID NO: 2137 - RNA, 19 nt, artificial
  siRNA Oligomer
auaccugugaggauaggaa

SEQ ID NO: 2138 - RNA, 19 nt, artificial
  siRNA Oligomer
uucaugauuggguaguaaa

SEQ ID NO: 2139 - RNA, 19 nt, artificial
  siRNA Oligomer
cuacaaagccaaucuuuau

SEQ ID NO: 2140 - RNA, 19 nt, artificial
  siRNA Oligomer
gagccugcuaagugauuuu

SEQ ID NO: 2141 - RNA, 19 nt, artificial
  siRNA Oligomer
aacccuagguaagaguaaa

SEQ ID NO: 2142 - RNA, 19 nt, artificial
  siRNA Oligomer
uaacccuagguaagaguaa

SEQ ID NO: 2143 - RNA, 19 nt, artificial
  siRNA Oligomer
caaaauggugauggcuuau

SEQ ID NO: 2144 - RNA, 19 nt, artificial
  siRNA Oligomer
uuagccaguguucuaacaa

SEQ ID NO: 2145 - RNA, 19 nt, artificial
  siRNA Oligomer
aacuguuguccuuuuucca

SEQ ID NO: 2146 - RNA, 19 nt, artificial
  siRNA Oligomer
gcauuucagaauugcugga

SEQ ID NO: 2147 - RNA, 19 nt, artificial
  siRNA Oligomer
guaccuacuuuugagcuua

SEQ ID NO: 2148 - RNA, 19 nt, artificial
  siRNA Oligomer
cugucuguccaaaucaaag

SEQ ID NO: 2149 - RNA, 19 nt, artificial
  siRNA Oligomer
gucuuauuccaacuaagua

SEQ ID NO: 2150 - RNA, 19 nt, artificial
  siRNA Oligomer
uuguguuuaagcaggagaa

SEQ ID NO: 2151 - RNA, 19 nt, artificial
  siRNA Oligomer
ugccagaauuugguuaaaa

SEQ ID NO: 2152 - RNA, 19 nt, artificial
  siRNA Oligomer
cuaauguuuuaaagaggca

SEQ ID NO: 2153 - RNA, 19 nt, artificial
  siRNA Oligomer
cuaaguuuucagaggauuu

SEQ ID NO: 2154 - RNA, 19 nt, artificial
  siRNA Oligomer
gguuuauaguacagccuag

SEQ ID NO: 2155 - RNA, 19 nt, artificial
  siRNA Oligomer
acaggaagguaggauuaag

SEQ ID NO: 2156 - RNA, 19 nt, artificial
  siRNA Oligomer
uccucugguuucaggagaa

SEQ ID NO: 2157 - RNA, 19 nt, artificial
  siRNA Oligomer
uguuguuuuagaugccuuu

SEQ ID NO: 2158 - RNA, 19 nt, artificial
  siRNA Oligomer
ucucugauucacuuaguaa

SEQ ID NO: 2159 - RNA, 19 nt, artificial
  siRNA Oligomer
ugauuuugacuacugggau

SEQ ID NO: 2160 - RNA, 19 nt, artificial
  siRNA Oligomer
agagagccugcuaagugau

SEQ ID NO: 2161 - RNA, 19 nt, artificial
  siRNA Oligomer
ggugauggcuuauggaagg

SEQ ID NO: 2162 - RNA, 19 nt, artificial
  siRNA Oligomer
ugucaaggguaguagcugu

SEQ ID NO: 2163 - RNA, 19 nt, artificial
  siRNA Oligomer
cgcuucuccucugguuuca

SEQ ID NO: 2164 - RNA, 19 nt, artificial
  siRNA Oligomer
auguuguuuugcaugucua

SEQ ID NO: 2165 - RNA, 19 nt, artificial
  siRNA Oligomer
cuagcgucguaccuacuuu

SEQ ID NO: 2166 - RNA, 19 nt, artificial
  siRNA Oligomer
ccagauaaccaugcaugca

SEQ ID NO: 2167 - RNA, 19 nt, artificial
  siRNA Oligomer
cuuccaaaagcccacacca

SEQ ID NO: 2168 - RNA, 19 nt, artificial
  siRNA Oligomer
aguuaucuuugacucucuu

SEQ ID NO: 2169 - RNA, 19 nt, artificial
  siRNA Oligomer
cuuaaguguugaauacugu

SEQ ID NO: 2170 - RNA, 19 nt, artificial
  siRNA Oligomer
cauagcaacugcagcuaac

SEQ ID NO: 2171 - RNA, 19 nt, artificial
  siRNA Oligomer
ccggccagcauuucagaau

SEQ ID NO: 2172 - RNA, 19 nt, artificial
  siRNA Oligomer
ggccaagauaaaucaaugu

SEQ ID NO: 2173 - RNA, 19 nt, artificial
  siRNA Oligomer
auauuacggcaauaaugga

SEQ ID NO: 2174 - RNA, 19 nt, artificial
  siRNA Oligomer
acuuccucacucuaauguu

SEQ ID NO: 2175 - RNA, 19 nt, artificial
  siRNA Oligomer
uaaaaagcuggauaggauu

SEQ ID NO: 2176 - RNA, 19 nt, artificial
  siRNA Oligomer
auguuguuccugaacccaa

SEQ ID NO: 2177 - RNA, 19 nt, artificial
  siRNA Oligomer
gguuucaggagaacucuga

SEQ ID NO: 2178 - RNA, 19 nt, artificial
  siRNA Oligomer
caugguugcaacuggcagu

SEQ ID NO: 2179 - RNA, 19 nt, artificial
  siRNA Oligomer
uuucagguaggcuugguaa

SEQ ID NO: 2180 - RNA, 19 nt, artificial
  siRNA Oligomer
ugugauccuguuacugaua

SEQ ID NO: 2181 - RNA, 19 nt, artificial
  siRNA Oligomer
uuucaugauuggguaguaa

SEQ ID NO: 2182 - RNA, 19 nt, artificial
  siRNA Oligomer
guuuuuagacaggaaggua

SEQ ID NO: 2183 - RNA, 19 nt, artificial
  siRNA Oligomer
agguuuccugcccuagcua

SEQ ID NO: 2184 - RNA, 19 nt, artificial
  siRNA Oligomer
caacaauguucaauucagc

SEQ ID NO: 2185 - RNA, 19 nt, artificial
  siRNA Oligomer
ccucuuuucaguauuacau

SEQ ID NO: 2186 - RNA, 19 nt, artificial
  siRNA Oligomer
gucaaggguaguagcugua

SEQ ID NO: 2187 - RNA, 19 nt, artificial
  siRNA Oligomer
aguguugaauacugucuuu

SEQ ID NO: 2188 - RNA, 19 nt, artificial
  siRNA Oligomer
gaacaacagugauugaagg

SEQ ID NO: 2189 - RNA, 19 nt, artificial
  siRNA Oligomer
uccucuuuucaguauuaca

SEQ ID NO: 2190 - RNA, 19 nt, artificial
  siRNA Oligomer
aggaaucaacuugccagaa

SEQ ID NO: 2191 - RNA, 19 nt, artificial
  siRNA Oligomer
cguccagauaaccaugcau

SEQ ID NO: 2192 - RNA, 19 nt, artificial
  siRNA Oligomer
ccuuuuuccacuaacaguu

SEQ ID NO: 2193 - RNA, 19 nt, artificial
  siRNA Oligomer
cagaauugaaugggaugga

SEQ ID NO: 2194 - RNA, 19 nt, artificial
  siRNA Oligomer
uuuucuggccuuuggagaa

SEQ ID NO: 2195 - RNA, 19 nt, artificial
  siRNA Oligomer
ccucucugauucacuuagu

SEQ ID NO: 2196 - RNA, 19 nt, artificial
  siRNA Oligomer
gucccucucugauucacuu

SEQ ID NO: 2197 - RNA, 19 nt, artificial
  siRNA Oligomer
aggguccuaaaaagggaaa

SEQ ID NO: 2198 - RNA, 19 nt, artificial
  siRNA Oligomer
uauagaauugggccaagau

SEQ ID NO: 2199 - RNA, 19 nt, artificial
  siRNA Oligomer
guuucaggagaacucugau

SEQ ID NO: 2200 - RNA, 19 nt, artificial
  siRNA Oligomer
gcuauuagcuccacuucac

SEQ ID NO: 2201 - RNA, 19 nt, artificial
  siRNA Oligomer
ugggccaagauaaaucaau

SEQ ID NO: 2202 - RNA, 19 nt, artificial
  siRNA Oligomer
acucaaauuugaaggguuu

SEQ ID NO: 2203 - RNA, 19 nt, artificial
  siRNA Oligomer
cuaacaggcugauuuucug

SEQ ID NO: 2204 - RNA, 19 nt, artificial
  siRNA Oligomer
caauguucaauucagcaag

SEQ ID NO: 2205 - RNA, 19 nt, artificial
  siRNA Oligomer
ugguguuacugaaaaacag

SEQ ID NO: 2206 - RNA, 19 nt, artificial
  siRNA Oligomer
guuccugaacccaaccuca

SEQ ID NO: 2207 - RNA, 19 nt, artificial
  siRNA Oligomer
aggagaacucugauccuca

SEQ ID NO: 2208 - RNA, 19 nt, artificial
  siRNA Oligomer
uugccagaauuugguuaaa

SEQ ID NO: 2209 - RNA, 19 nt, artificial
  siRNA Oligomer
uguauacuaccacuuugaa

SEQ ID NO: 2210 - RNA, 19 nt, artificial
  siRNA Oligomer
auccugguguuacugaaaa

SEQ ID NO: 2211 - RNA, 19 nt, artificial
  siRNA Oligomer
cagcuaacaggcugauuuu

SEQ ID NO: 2212 - RNA, 19 nt, artificial
  siRNA Oligomer
cccaaauguagucucuuuu

SEQ ID NO: 2213 - RNA, 19 nt, artificial
  siRNA Oligomer
ccaugcaugcacccagauu

SEQ ID NO: 2214 - RNA, 19 nt, artificial
  siRNA Oligomer
auggugauggcuuauggaa

SEQ ID NO: 2215 - RNA, 19 nt, artificial
  siRNA Oligomer
gaaccauuucaccauggca

SEQ ID NO: 2216 - RNA, 19 nt, artificial
  siRNA Oligomer
acuaaacuugguugcucaa

SEQ ID NO: 2217 - RNA, 19 nt, artificial
  siRNA Oligomer
uuuucugcauagaucccau

SEQ ID NO: 2218 - RNA, 19 nt, artificial
  siRNA Oligomer
acgaagucugcauuggcua

SEQ ID NO: 2219 - RNA, 19 nt, artificial
  siRNA Oligomer
gaucauuaucucuuuccuu

SEQ ID NO: 2220 - RNA, 19 nt, artificial
  siRNA Oligomer
uggcuauggagauaugguu

SEQ ID NO: 2221 - RNA, 19 nt, artificial
  siRNA Oligomer
gguaguagcuguauacuac

SEQ ID NO: 2222 - RNA, 19 nt, artificial
  siRNA Oligomer
uugggccaagauaaaucaa

SEQ ID NO: 2223 - RNA, 19 nt, artificial
  siRNA Oligomer
ccaauugucaaggguagua

SEQ ID NO: 2224 - RNA, 19 nt, artificial
  siRNA Oligomer
cuuaguaaucuauccucuu

SEQ ID NO: 2225 - RNA, 19 nt, artificial
  siRNA Oligomer
uggugauggcuuauggaag

SEQ ID NO: 2226 - RNA, 19 nt, artificial
  siRNA Oligomer
cuggaguugucaccacuga

SEQ ID NO: 2227 - RNA, 19 nt, artificial
  siRNA Oligomer
cacugauuggaacaacagu

SEQ ID NO: 2228 - RNA, 19 nt, artificial
  siRNA Oligomer
caguuugagcagcaagaac

SEQ ID NO: 2229 - RNA, 19 nt, artificial
  siRNA Oligomer
uagggacagauguauucau

SEQ ID NO: 2230 - RNA, 19 nt, artificial
  siRNA Oligomer
caaucuuuauagaauuggg

SEQ ID NO: 2231 - RNA, 19 nt, artificial
  siRNA Oligomer
uguccuuuuuccacuaaca

SEQ ID NO: 2232 - RNA, 19 nt, artificial
  siRNA Oligomer
guccuaaaaagggaaaaua

SEQ ID NO: 2233 - RNA, 19 nt, artificial
  siRNA Oligomer
gguugcaacuggcaguuug

SEQ ID NO: 2234 - RNA, 19 nt, artificial
  siRNA Oligomer
agccuaucaaaacuuccaa

SEQ ID NO: 2235 - RNA, 19 nt, artificial
  siRNA Oligomer
cuaaacucuucaaaugcuu

SEQ ID NO: 2236 - RNA, 19 nt, artificial
  siRNA Oligomer
cuuggauaccugucacuag

SEQ ID NO: 2237 - RNA, 19 nt, artificial
  siRNA Oligomer
caacgagguaauauuugag

SEQ ID NO: 2238 - RNA, 19 nt, artificial
  siRNA Oligomer
gagguuguguuaugcacgu

SEQ ID NO: 2239 - RNA, 19 nt, artificial
  siRNA Oligomer
cuugccagaauuugguuaa

SEQ ID NO: 2240 - RNA, 19 nt, artificial
  siRNA Oligomer
aaaagcuuguggugccauu

SEQ ID NO: 2241 - RNA, 19 nt, artificial
  siRNA Oligomer
gcaaggcuuucauauccuu

SEQ ID NO: 2242 - RNA, 19 nt, artificial
  siRNA Oligomer
accugucacuagggaauaa

SEQ ID NO: 2243 - RNA, 19 nt, artificial
  siRNA Oligomer
agcuuguggugccauuuca

SEQ ID NO: 2244 - RNA, 19 nt, artificial
  siRNA Oligomer
gggacuuuuucuuuaguag

SEQ ID NO: 2245 - RNA, 19 nt, artificial
  siRNA Oligomer
cuagguaagaguaaaugag

SEQ ID NO: 2246 - RNA, 19 nt, artificial
  siRNA Oligomer
cguaccuacuuuugagcuu

SEQ ID NO: 2247 - RNA, 19 nt, artificial
  siRNA Oligomer
aagauacuacaaagccaau

SEQ ID NO: 2248 - RNA, 19 nt, artificial
  siRNA Oligomer
cucaggauuucgacuuguu

SEQ ID NO: 2249 - RNA, 19 nt, artificial
  siRNA Oligomer
cuuuauagaauugggccaa

SEQ ID NO: 2250 - RNA, 19 nt, artificial
  siRNA Oligomer
cccauuuuuguacagaauu

SEQ ID NO: 2251 - RNA, 19 nt, artificial
  siRNA Oligomer
uuguggugccauuucagua

SEQ ID NO: 2252 - RNA, 19 nt, artificial
  siRNA Oligomer
guguguaguugauuacucu

SEQ ID NO: 2253 - RNA, 19 nt, artificial
  siRNA Oligomer
guuuauaguacagccuaga

SEQ ID NO: 2254 - RNA, 19 nt, artificial
  siRNA Oligomer
augagaaauauuacggcaa

SEQ ID NO: 2255 - RNA, 19 nt, artificial
  siRNA Oligomer
cacccagauuuuuuccacc

SEQ ID NO: 2256 - RNA, 19 nt, artificial
  siRNA Oligomer
aucccauuuuuguacagaa

SEQ ID NO: 2257 - RNA, 19 nt, artificial
  siRNA Oligomer
cagaauugcuggacugugg

SEQ ID NO: 2258 - RNA, 19 nt, artificial
  siRNA Oligomer
ugacuacugggauuauguu

SEQ ID NO: 2259 - RNA, 19 nt, artificial
  siRNA Oligomer
gauccuguuacugauacua

SEQ ID NO: 2260 - RNA, 19 nt, artificial
  siRNA Oligomer
uccaaaucaaagcaaacua

SEQ ID NO: 2261 - RNA, 19 nt, artificial
  siRNA Oligomer
ucugggcuuuucugggaau

SEQ ID NO: 2262 - RNA, 19 nt, artificial
  siRNA Oligomer
ccauuuuuguacagaauug

SEQ ID NO: 2263 - RNA, 19 nt, artificial
  siRNA Oligomer
cuggccuuuggagaaguga

SEQ ID NO: 2264 - RNA, 19 nt, artificial
  siRNA Oligomer
uaggaaauuaguucugaga

SEQ ID NO: 2265 - RNA, 19 nt, artificial
  siRNA Oligomer
cuuaaucucagaugaacca

SEQ ID NO: 2266 - RNA, 19 nt, artificial
  siRNA Oligomer
aggaaauuaguucugagau

SEQ ID NO: 2267 - RNA, 19 nt, artificial
  siRNA Oligomer
aggcuugguaauagacuau

SEQ ID NO: 2268 - RNA, 19 nt, artificial
  siRNA Oligomer
gaauuugguuaaaaugcug

SEQ ID NO: 2269 - RNA, 19 nt, artificial
  siRNA Oligomer
uagacaggaagguaggauu

SEQ ID NO: 2270 - RNA, 19 nt, artificial
  siRNA Oligomer
uugaaguaucucuccuuaa

SEQ ID NO: 2271 - RNA, 19 nt, artificial
  siRNA Oligomer
cuuugacucucuugccugu

SEQ ID NO: 2272 - RNA, 19 nt, artificial
  siRNA Oligomer
uguggcuaucacccagaga

SEQ ID NO: 2273 - RNA, 19 nt, artificial
  siRNA Oligomer
aggccuuauuuuuugucuu

SEQ ID NO: 2274 - RNA, 19 nt, artificial
  siRNA Oligomer
caguguuaucucaucucug

SEQ ID NO: 2275 - RNA, 19 nt, artificial
  siRNA Oligomer
ugagaaacugacccagaga

SEQ ID NO: 2276 - RNA, 19 nt, artificial
  siRNA Oligomer
uguuguuccugaacccaac

SEQ ID NO: 2277 - RNA, 19 nt, artificial
  siRNA Oligomer
guuguccuuuuuccacuaa

SEQ ID NO: 2278 - RNA, 19 nt, artificial
  siRNA Oligomer
ggcaauaauggaacugcuu

SEQ ID NO: 2279 - RNA, 19 nt, artificial
  siRNA Oligomer
acaauguucaauucagcaa

SEQ ID NO: 2280 - RNA, 19 nt, artificial
  siRNA Oligomer
gcaacuggcaguuugagca

SEQ ID NO: 2281 - RNA, 19 nt, artificial
  siRNA Oligomer
ggguuuuuagacaggaagg

SEQ ID NO: 2282 - RNA, 19 nt, artificial
  siRNA Oligomer
guaggauuaaguaggugag

SEQ ID NO: 2283 - RNA, 19 nt, artificial
  siRNA Oligomer
ugaaacucaccguccagau

SEQ ID NO: 2284 - RNA, 19 nt, artificial
  siRNA Oligomer
ugauccuguuacugauacu

SEQ ID NO: 2285 - RNA, 19 nt, artificial
  siRNA Oligomer
auuucaugauuggguagua

SEQ ID NO: 2286 - RNA, 19 nt, artificial
  siRNA Oligomer
agaugccuuuauaagcuca

SEQ ID NO: 2287 - RNA, 19 nt, artificial
  siRNA Oligomer
ccucaacgagguaauauuu

SEQ ID NO: 2288 - RNA, 19 nt, artificial
  siRNA Oligomer
guuaagcuccaaagguuca

SEQ ID NO: 2289 - RNA, 19 nt, artificial
  siRNA Oligomer
ccuagcuauuagcuccacu

SEQ ID NO: 2290 - RNA, 19 nt, artificial
  siRNA Oligomer
guagggacagauguauuca

SEQ ID NO: 2291 - RNA, 19 nt, artificial
  siRNA Oligomer
uucuguguuucacauucau

SEQ ID NO: 2292 - RNA, 19 nt, artificial
  siRNA Oligomer
gguaggcuugguaauagac

SEQ ID NO: 2293 - RNA, 19 nt, artificial
  siRNA Oligomer
caggugugauccuguuacu

SEQ ID NO: 2294 - RNA, 19 nt, artificial
  siRNA Oligomer
uauucagcuagucagcuaa

SEQ ID NO: 2295 - RNA, 19 nt, artificial
  siRNA Oligomer
acucuucaaaugcuuggaa

SEQ ID NO: 2296 - RNA, 19 nt, artificial
  siRNA Oligomer
uggacuagcuucagggacu

SEQ ID NO: 2297 - RNA, 19 nt, artificial
  siRNA Oligomer
ugcacgugaacuuggaaau

SEQ ID NO: 2298 - RNA, 19 nt, artificial
  siRNA Oligomer
caucgauguagaacuguug

SEQ ID NO: 2299 - RNA, 19 nt, artificial
  siRNA Oligomer
gagcuuacacuuguguuua

SEQ ID NO: 2300 - RNA, 19 nt, artificial
  siRNA Oligomer
uguuucacauucauagcaa

SEQ ID NO: 2301 - RNA, 19 nt, artificial
  siRNA Oligomer
ccucacucuaauguuuuaa

SEQ ID NO: 2302 - RNA, 19 nt, artificial
  siRNA Oligomer
ggcugauuuucuggccuuu

SEQ ID NO: 2303 - RNA, 19 nt, artificial
  siRNA Oligomer
ucugggaauugaaguaucu

SEQ ID NO: 2304 - RNA, 19 nt, artificial
  siRNA Oligomer
cuuuugagcuuacacuugu

SEQ ID NO: 2305 - RNA, 19 nt, artificial
  siRNA Oligomer
cacuguuucuuggugacuu

SEQ ID NO: 2306 - RNA, 19 nt, artificial
  siRNA Oligomer
uguucaaauuagccagugu

SEQ ID NO: 2307 - RNA, 19 nt, artificial
  siRNA Oligomer
aaugagaaauauuacggca

SEQ ID NO: 2308 - RNA, 19 nt, artificial
  siRNA Oligomer
cauggcaguguuaucucau

SEQ ID NO: 2309 - RNA, 19 nt, artificial
  siRNA Oligomer
cuguuaugcuuacaaaaug

SEQ ID NO: 2310 - RNA, 19 nt, artificial
  siRNA Oligomer
gcuuucauauccuugcugu

SEQ ID NO: 2311 - RNA, 19 nt, artificial
  siRNA Oligomer
agcuaaagucauuuguagu

SEQ ID NO: 2312 - RNA, 19 nt, artificial
  siRNA Oligomer
ucuguguuucacauucaua

SEQ ID NO: 2313 - RNA, 19 nt, artificial
  siRNA Oligomer
auuagccaguguucuaaca

SEQ ID NO: 2314 - RNA, 19 nt, artificial
  siRNA Oligomer
aguagaagcccauuugagu

SEQ ID NO: 2315 - RNA, 19 nt, artificial
  siRNA Oligomer
auguauucauccugguguu

SEQ ID NO: 2316 - RNA, 19 nt, artificial
  siRNA Oligomer
guaguugauuacucuucca

SEQ ID NO: 2317 - RNA, 19 nt, artificial
  siRNA Oligomer
uguaaaaagcuggauagga

SEQ ID NO: 2318 - RNA, 19 nt, artificial
  siRNA Oligomer
uguuuugcaugucuauugu

SEQ ID NO: 2319 - RNA, 19 nt, artificial
  siRNA Oligomer
cuucaaaugcuuggaaaga

SEQ ID NO: 2320 - RNA, 19 nt, artificial
  siRNA Oligomer
ucauagcaacugcagcuaa

SEQ ID NO: 2321 - RNA, 19 nt, artificial
  siRNA Oligomer
cagccuagagaaugaaacu

SEQ ID NO: 2322 - RNA, 19 nt, artificial
  siRNA Oligomer
uauuacggcaauaauggaa

SEQ ID NO: 2323 - RNA, 19 nt, artificial
  siRNA Oligomer
aaagguucacuguguuucu

SEQ ID NO: 2324 - RNA, 19 nt, artificial
  siRNA Oligomer
gugauuuugacuacuggga

SEQ ID NO: 2325 - RNA, 19 nt, artificial
  siRNA Oligomer
aagcaaaaguagaagccca

SEQ ID NO: 2326 - RNA, 19 nt, artificial
  siRNA Oligomer
gguuuccugcccuagcuau

SEQ ID NO: 2327 - RNA, 19 nt, artificial
  siRNA Oligomer
cucuuuucuuucuguguuu

SEQ ID NO: 2328 - RNA, 19 nt, artificial
  siRNA Oligomer
gcccuagcuauuagcucca

SEQ ID NO: 2329 - RNA, 19 nt, artificial
  siRNA Oligomer
ccagcauuucagaauugcu

SEQ ID NO: 2330 - RNA, 19 nt, artificial
  siRNA Oligomer
agggacuuuuucuuuagua

SEQ ID NO: 2331 - RNA, 19 nt, artificial
  siRNA Oligomer
caaauguagucucuuuucu

SEQ ID NO: 2332 - RNA, 19 nt, artificial
  siRNA Oligomer
ccaagauaaaucaauguug

SEQ ID NO: 2333 - RNA, 19 nt, artificial
  siRNA Oligomer
auguauguaaaaagcugga

SEQ ID NO: 2334 - RNA, 19 nt, artificial
  siRNA Oligomer
cgguguuguuuuagaugcc

SEQ ID NO: 2335 - RNA, 19 nt, artificial
  siRNA Oligomer
cagauuuuuuccaccuugg

SEQ ID NO: 2336 - RNA, 19 nt, artificial
  siRNA Oligomer
caaaaguagaagcccauuu

SEQ ID NO: 2337 - RNA, 19 nt, artificial
  siRNA Oligomer
uuauagaauugggccaaga

SEQ ID NO: 2338 - RNA, 19 nt, artificial
  siRNA Oligomer
aagguaggauuaaguaggu

SEQ ID NO: 2339 - RNA, 19 nt, artificial
  siRNA Oligomer
uaaggagcuuauucagguu

SEQ ID NO: 2340 - RNA, 19 nt, artificial
  siRNA Oligomer
guguuguuuuagaugccuu

SEQ ID NO: 2341 - RNA, 19 nt, artificial
  siRNA Oligomer
guuuccugcccuagcuauu

SEQ ID NO: 2342 - RNA, 19 nt, artificial
  siRNA Oligomer
auucagcaaggcuuucaua

SEQ ID NO: 2343 - RNA, 19 nt, artificial
  siRNA Oligomer
caauuugguuucagguagg

SEQ ID NO: 2344 - RNA, 19 nt, artificial
  siRNA Oligomer
guuguuuuagaugccuuua

SEQ ID NO: 2345 - RNA, 19 nt, artificial
  siRNA Oligomer
gcauuggcuauggagauau

SEQ ID NO: 2346 - RNA, 19 nt, artificial
  siRNA Oligomer
cugagaaacugacccagag

SEQ ID NO: 2347 - RNA, 19 nt, artificial
  siRNA Oligomer
uaugcuuacaaaaugguga

SEQ ID NO: 2348 - RNA, 19 nt, artificial
  siRNA Oligomer
aacuaaacuugguugcuca

SEQ ID NO: 2349 - RNA, 19 nt, artificial
  siRNA Oligomer
aaugcuuggaaagauacua

SEQ ID NO: 2350 - RNA, 19 nt, artificial
  siRNA Oligomer
gucuguccaaaucaaagca

SEQ ID NO: 2351 - RNA, 19 nt, artificial
  siRNA Oligomer
auugcuggacuguggcuau

SEQ ID NO: 2352 - RNA, 19 nt, artificial
  siRNA Oligomer
uuaguuuguuagaacacug

SEQ ID NO: 2353 - RNA, 19 nt, artificial
  siRNA Oligomer
uaguuuguuagaacacugg

SEQ ID NO: 2354 - RNA, 19 nt, artificial
  siRNA Oligomer
uucaauucccagaaaagcc

SEQ ID NO: 2355 - RNA, 19 nt, artificial
  siRNA Oligomer
uucaauuuccaaguucacg

SEQ ID NO: 2356 - RNA, 19 nt, artificial
  siRNA Oligomer
uugcuuaccuauuccaucc

SEQ ID NO: 2357 - RNA, 19 nt, artificial
  siRNA Oligomer
uuuguuagaacacuggcua

SEQ ID NO: 2358 - RNA, 19 nt, artificial
  siRNA Oligomer
uuuuuaggacccuucaauc

SEQ ID NO: 2359 - RNA, 19 nt, artificial
  siRNA Oligomer
uuuaucuuggcccaauucu

SEQ ID NO: 2360 - RNA, 19 nt, artificial
  siRNA Oligomer
uuauccacgacccacagca

SEQ ID NO: 2361 - RNA, 19 nt, artificial
  siRNA Oligomer
uucucauuuacucuuaccu

SEQ ID NO: 2362 - RNA, 19 nt, artificial
  siRNA Oligomer
uuugcuuugauuuggacag

SEQ ID NO: 2363 - RNA, 19 nt, artificial
  siRNA Oligomer
uuuuacuacccaaucauga

SEQ ID NO: 2364 - RNA, 19 nt, artificial
  siRNA Oligomer
aguuuguuagaacacuggc

SEQ ID NO: 2365 - RNA, 19 nt, artificial
  siRNA Oligomer
uuuaggacccuucaaucac

SEQ ID NO: 2366 - RNA, 19 nt, artificial
  siRNA Oligomer
auuaauuuaacagccuucc

SEQ ID NO: 2367 - RNA, 19 nt, artificial
  siRNA Oligomer
uuaacagccuuccauaagc

SEQ ID NO: 2368 - RNA, 19 nt, artificial
  siRNA Oligomer
uauaguaucaguaacagga

SEQ ID NO: 2369 - RNA, 19 nt, artificial
  siRNA Oligomer
uuucucagggacaaggacc

SEQ ID NO: 2370 - RNA, 19 nt, artificial
  siRNA Oligomer
uucuccagcauuuuaacca

SEQ ID NO: 2371 - RNA, 19 nt, artificial
  siRNA Oligomer
uucaucauucacucaaugg

SEQ ID NO: 2372 - RNA, 19 nt, artificial
  siRNA Oligomer
uuaacaagucgaaauccug

SEQ ID NO: 2373 - RNA, 19 nt, artificial
  siRNA Oligomer
ucaauuuccaaguucacgu

SEQ ID NO: 2374 - RNA, 19 nt, artificial
  siRNA Oligomer
aucaguaacaggaucacac

SEQ ID NO: 2375 - RNA, 19 nt, artificial
  siRNA Oligomer
uuccucaaauauuaccucg

SEQ ID NO: 2376 - RNA, 19 nt, artificial
  siRNA Oligomer
uuguaguaucuuuccaagc

SEQ ID NO: 2377 - RNA, 19 nt, artificial
  siRNA Oligomer
uugaacagugacauuuuag

SEQ ID NO: 2378 - RNA, 19 nt, artificial
  siRNA Oligomer
auuagagugaggaagucac

SEQ ID NO: 2379 - RNA, 19 nt, artificial
  siRNA Oligomer
uuuuguaagcauaacaggc

SEQ ID NO: 2380 - RNA, 19 nt, artificial
  siRNA Oligomer
ucuauuaccaagccuaccu

SEQ ID NO: 2381 - RNA, 19 nt, artificial
  siRNA Oligomer
auccucacagguauucauc

SEQ ID NO: 2382 - RNA, 19 nt, artificial
  siRNA Oligomer
uauuauucccuagugacag

SEQ ID NO: 2383 - RNA, 19 nt, artificial
  siRNA Oligomer
uuuguugccucuuuaaaac

SEQ ID NO: 2384 - RNA, 19 nt, artificial
  siRNA Oligomer
guuuaguuuguuagaacac

SEQ ID NO: 2385 - RNA, 19 nt, artificial
  siRNA Oligomer
auauagucuauuaccaagc

SEQ ID NO: 2386 - RNA, 19 nt, artificial
  siRNA Oligomer
uuucaguaacaccaggaug

SEQ ID NO: 2387 - RNA, 19 nt, artificial
  siRNA Oligomer
uuuggaaguuuugauaggc

SEQ ID NO: 2388 - RNA, 19 nt, artificial
  siRNA Oligomer
uuuuucaguaacaccagga

SEQ ID NO: 2389 - RNA, 19 nt, artificial
  siRNA Oligomer
aucuaaaacaacaccgugg

SEQ ID NO: 2390 - RNA, 19 nt, artificial
  siRNA Oligomer
uucuugcugcucaaacugc

SEQ ID NO: 2391 - RNA, 19 nt, artificial
  siRNA Oligomer
uuuguaguaucuuuccaag

SEQ ID NO: 2392 - RNA, 19 nt, artificial
  siRNA Oligomer
uacgacgcuagaaucacac

SEQ ID NO: 2393 - RNA, 19 nt, artificial
  siRNA Oligomer
uucuacaucgaugcccaag

SEQ ID NO: 2394 - RNA, 19 nt, artificial
  siRNA Oligomer
ucaauucccagaaaagccc

SEQ ID NO: 2395 - RNA, 19 nt, artificial
  siRNA Oligomer
uugauuuggacagacaguu

SEQ ID NO: 2396 - RNA, 19 nt, artificial
  siRNA Oligomer
guuuguuagaacacuggcu

SEQ ID NO: 2397 - RNA, 19 nt, artificial
  siRNA Oligomer
ucccuuuuuaggacccuuc

SEQ ID NO: 2398 - RNA, 19 nt, artificial
  siRNA Oligomer
uuaccuaggguuaagcuuu

SEQ ID NO: 2399 - RNA, 19 nt, artificial
  siRNA Oligomer
ucugagauuaagcacaugu

SEQ ID NO: 2400 - RNA, 19 nt, artificial
  siRNA Oligomer
uaaaacauuagagugagga

SEQ ID NO: 2401 - RNA, 19 nt, artificial
  siRNA Oligomer
uggcuuuguaguaucuuuc

SEQ ID NO: 2402 - RNA, 19 nt, artificial
  siRNA Oligomer
uuccugucuaaaaacccuu

SEQ ID NO: 2403 - RNA, 19 nt, artificial
  siRNA Oligomer
uucaguaacaccaggauga

SEQ ID NO: 2404 - RNA, 19 nt, artificial
  siRNA Oligomer
uuauaguaucaguaacagg

SEQ ID NO: 2405 - RNA, 19 nt, artificial
  siRNA Oligomer
uacaaaaaugggaucuaug

SEQ ID NO: 2406 - RNA, 19 nt, artificial
  siRNA Oligomer
uauuccaucccauucaauu

SEQ ID NO: 2407 - RNA, 19 nt, artificial
  siRNA Oligomer
uaauuuccuauccucacag

SEQ ID NO: 2408 - RNA, 19 nt, artificial
  siRNA Oligomer
ucauuuacucuuaccuagg

SEQ ID NO: 2409 - RNA, 19 nt, artificial
  siRNA Oligomer
aauaagcuccuuauccacg

SEQ ID NO: 2410 - RNA, 19 nt, artificial
  siRNA Oligomer
ucaaaauaggcaaaucugg

SEQ ID NO: 2411 - RNA, 19 nt, artificial
  siRNA Oligomer
uuuugaaucacuucuccaa

SEQ ID NO: 2412 - RNA, 19 nt, artificial
  siRNA Oligomer
ucuggcaaguugauuccuc

SEQ ID NO: 2413 - RNA, 19 nt, artificial
  siRNA Oligomer
uauugccguaauauuucuc

SEQ ID NO: 2414 - RNA, 19 nt, artificial
  siRNA Oligomer
uuccaucccauucaauucu

SEQ ID NO: 2415 - RNA, 19 nt, artificial
  siRNA Oligomer
uuuugcuuaccuauuccau

SEQ ID NO: 2416 - RNA, 19 nt, artificial
  siRNA Oligomer
auccuauccagcuuuuuac

SEQ ID NO: 2417 - RNA, 19 nt, artificial
  siRNA Oligomer
uugagucaggaacuggugg

SEQ ID NO: 2418 - RNA, 19 nt, artificial
  siRNA Oligomer
uagaacacuggcuaauuug

SEQ ID NO: 2419 - RNA, 19 nt, artificial
  siRNA Oligomer
uguuguuccaaucagugag

SEQ ID NO: 2420 - RNA, 19 nt, artificial
  siRNA Oligomer
uuggacagacaguucucca

SEQ ID NO: 2421 - RNA, 19 nt, artificial
  siRNA Oligomer
uuaucuuggcccaauucua

SEQ ID NO: 2422 - RNA, 19 nt, artificial
  siRNA Oligomer
uuuccaagcauuugaagag

SEQ ID NO: 2423 - RNA, 19 nt, artificial
  siRNA Oligomer
uccuuauccacgacccaca

SEQ ID NO: 2424 - RNA, 19 nt, artificial
  siRNA Oligomer
ugaacagugacauuuuagg

SEQ ID NO: 2425 - RNA, 19 nt, artificial
  siRNA Oligomer
uuuuaggacccuucaauca

SEQ ID NO: 2426 - RNA, 19 nt, artificial
  siRNA Oligomer
uucucugggucaguuucuc

SEQ ID NO: 2427 - RNA, 19 nt, artificial
  siRNA Oligomer
uuugagucaggaacuggug

SEQ ID NO: 2428 - RNA, 19 nt, artificial
  siRNA Oligomer
ucagggacaaggaccuuug

SEQ ID NO: 2429 - RNA, 19 nt, artificial
  siRNA Oligomer
agguauucaucauucacuc

SEQ ID NO: 2430 - RNA, 19 nt, artificial
  siRNA Oligomer
ugaagcaguuccauuauug

SEQ ID NO: 2431 - RNA, 19 nt, artificial
  siRNA Oligomer
ucaaagauaacuguuagug

SEQ ID NO: 2432 - RNA, 19 nt, artificial
  siRNA Oligomer
ucaaaaguagguacgacgc

SEQ ID NO: 2433 - RNA, 19 nt, artificial
  siRNA Oligomer
aauucugaaaugcuggccg

SEQ ID NO: 2434 - RNA, 19 nt, artificial
  siRNA Oligomer
uucaucugagauuaagcac

SEQ ID NO: 2435 - RNA, 19 nt, artificial
  siRNA Oligomer
uucacgugcauaacacaac

SEQ ID NO: 2436 - RNA, 19 nt, artificial
  siRNA Oligomer
ucauucucuaggcuguacu

SEQ ID NO: 2437 - RNA, 19 nt, artificial
  siRNA Oligomer
uuugauuuggacagacagu

SEQ ID NO: 2438 - RNA, 19 nt, artificial
  siRNA Oligomer
uuaaacacaaguguaagcu

SEQ ID NO: 2439 - RNA, 19 nt, artificial
  siRNA Oligomer
auaguuuuacuacccaauc

SEQ ID NO: 2440 - RNA, 19 nt, artificial
  siRNA Oligomer
uuucaauuuccaaguucac

SEQ ID NO: 2441 - RNA, 19 nt, artificial
  siRNA Oligomer
auuuuaaccaaauucuggc

SEQ ID NO: 2442 - RNA, 19 nt, artificial
  siRNA Oligomer
uugcugcucaaacugccag

SEQ ID NO: 2443 - RNA, 19 nt, artificial
  siRNA Oligomer
auuccaucccauucaauuc

SEQ ID NO: 2444 - RNA, 19 nt, artificial
  siRNA Oligomer
uuuauuauucccuagugac

SEQ ID NO: 2445 - RNA, 19 nt, artificial
  siRNA Oligomer
ucagagagggacuagaucu

SEQ ID NO: 2446 - RNA, 19 nt, artificial
  siRNA Oligomer
ucuacaucgaugcccaaga

SEQ ID NO: 2447 - RNA, 19 nt, artificial
  siRNA Oligomer
aucuugagcaauucucugg

SEQ ID NO: 2448 - RNA, 19 nt, artificial
  siRNA Oligomer
ucaacacuuaagaacaggg

SEQ ID NO: 2449 - RNA, 19 nt, artificial
  siRNA Oligomer
uugagcaauucucuggguc

SEQ ID NO: 2450 - RNA, 19 nt, artificial
  siRNA Oligomer
uuugaaucacuucuccaaa

SEQ ID NO: 2451 - RNA, 19 nt, artificial
  siRNA Oligomer
acagguauucaucauucac

SEQ ID NO: 2452 - RNA, 19 nt, artificial
  siRNA Oligomer
uaacaagucgaaauccuga

SEQ ID NO: 2453 - RNA, 19 nt, artificial
  siRNA Oligomer
cagguauucaucauucacu

SEQ ID NO: 2454 - RNA, 19 nt, artificial
  siRNA Oligomer
uuaauccuaccuuccuguc

SEQ ID NO: 2455 - RNA, 19 nt, artificial
  siRNA Oligomer
uuuucccuuuuuaggaccc

SEQ ID NO: 2456 - RNA, 19 nt, artificial
  siRNA Oligomer
cugaauaagcuccuuaucc

SEQ ID NO: 2457 - RNA, 19 nt, artificial
  siRNA Oligomer
uuuaacagccuuccauaag

SEQ ID NO: 2458 - RNA, 19 nt, artificial
  siRNA Oligomer
aacggcucuguuuccuucg

SEQ ID NO: 2459 - RNA, 19 nt, artificial
  siRNA Oligomer
gaguuuaguuuguuagaac

SEQ ID NO: 2460 - RNA, 19 nt, artificial
  siRNA Oligomer
uuaccuauuccaucccauu

SEQ ID NO: 2461 - RNA, 19 nt, artificial
  siRNA Oligomer
uucaacacuuaagaacagg

SEQ ID NO: 2462 - RNA, 19 nt, artificial
  siRNA Oligomer
uaagacaaaaaauaaggcc

SEQ ID NO: 2463 - RNA, 19 nt, artificial
  siRNA Oligomer
uacuaagugaaucagagag

SEQ ID NO: 2464 - RNA, 19 nt, artificial
  siRNA Oligomer
ucuugcugcucaaacugcc

SEQ ID NO: 2465 - RNA, 19 nt, artificial
  siRNA Oligomer
cucaaaaguagguacgacg

SEQ ID NO: 2466 - RNA, 19 nt, artificial
  siRNA Oligomer
uggacggugaguuucauuc

SEQ ID NO: 2467 - RNA, 19 nt, artificial
  siRNA Oligomer
uuggagcuuaacaauagac

SEQ ID NO: 2468 - RNA, 19 nt, artificial
  siRNA Oligomer
uauuaccucguugagguug

SEQ ID NO: 2469 - RNA, 19 nt, artificial
  siRNA Oligomer
uagucuauuaccaagccua

SEQ ID NO: 2470 - RNA, 19 nt, artificial
  siRNA Oligomer
uauccagcuuuuuacauac

SEQ ID NO: 2471 - RNA, 19 nt, artificial
  siRNA Oligomer
ucaaacugccaguugcaac

SEQ ID NO: 2472 - RNA, 19 nt, artificial
  siRNA Oligomer
gugaguuucauucucuagg

SEQ ID NO: 2473 - RNA, 19 nt, artificial
  siRNA Oligomer
ucaaaaucacuuagcaggc

SEQ ID NO: 2474 - RNA, 19 nt, artificial
  siRNA Oligomer
ugugaaguggagcuaauag

SEQ ID NO: 2475 - RNA, 19 nt, artificial
  siRNA Oligomer
uuaggacccuucaaucacu

SEQ ID NO: 2476 - RNA, 19 nt, artificial
  siRNA Oligomer
uaguauacagcuacuaccc

SEQ ID NO: 2477 - RNA, 19 nt, artificial
  siRNA Oligomer
auagacaugcaaaacaaca

SEQ ID NO: 2478 - RNA, 19 nt, artificial
  siRNA Oligomer
ucaaauuugagucaggaac

SEQ ID NO: 2479 - RNA, 19 nt, artificial
  siRNA Oligomer
aacaacaccgugguuacug

SEQ ID NO: 2480 - RNA, 19 nt, artificial
  siRNA Oligomer
uccaagguggaaaaaaucu

SEQ ID NO: 2481 - RNA, 19 nt, artificial
  siRNA Oligomer
ucuugagcaauucucuggg

SEQ ID NO: 2482 - RNA, 19 nt, artificial
  siRNA Oligomer
aucaaaauaggcaaaucug

SEQ ID NO: 2483 - RNA, 19 nt, artificial
  siRNA Oligomer
uuaauuuaacagccuucca

SEQ ID NO: 2484 - RNA, 19 nt, artificial
  siRNA Oligomer
uucucuaggcuguacuaua

SEQ ID NO: 2485 - RNA, 19 nt, artificial
  siRNA Oligomer
ucacgugcauaacacaacc

SEQ ID NO: 2486 - RNA, 19 nt, artificial
  siRNA Oligomer
uucccuagugacagguauc

SEQ ID NO: 2487 - RNA, 19 nt, artificial
  siRNA Oligomer
uuuuggaaguuuugauagg

SEQ ID NO: 2488 - RNA, 19 nt, artificial
  siRNA Oligomer
aauacaucugucccuacgc

SEQ ID NO: 2489 - RNA, 19 nt, artificial
  siRNA Oligomer
uuaggucacuuauaguauc

SEQ ID NO: 2490 - RNA, 19 nt, artificial
  siRNA Oligomer
auagccaaugcagacuucg

SEQ ID NO: 2491 - RNA, 19 nt, artificial
  siRNA Oligomer
aucacacacaauccuaucc

SEQ ID NO: 2492 - RNA, 19 nt, artificial
  siRNA Oligomer
aaucacuucuccaaaggcc

SEQ ID NO: 2493 - RNA, 19 nt, artificial
  siRNA Oligomer
ucuacuuuugcuuaccuau

SEQ ID NO: 2494 - RNA, 19 nt, artificial
  siRNA Oligomer
ucaccuacuuaauccuacc

SEQ ID NO: 2495 - RNA, 19 nt, artificial
  siRNA Oligomer
uaaacucaccuacuuaauc

SEQ ID NO: 2496 - RNA, 19 nt, artificial
  siRNA Oligomer
uacuuaauccuaccuuccu

SEQ ID NO: 2497 - RNA, 19 nt, artificial
  siRNA Oligomer
ucaguaacaggaucacacc

SEQ ID NO: 2498 - RNA, 19 nt, artificial
  siRNA Oligomer
ucccugaagcuaguccaug

SEQ ID NO: 2499 - RNA, 19 nt, artificial
  siRNA Oligomer
uccugucuaaaaacccuuc

SEQ ID NO: 2500 - RNA, 19 nt, artificial
  siRNA Oligomer
uugaaucacuucuccaaag

SEQ ID NO: 2501 - RNA, 19 nt, artificial
  siRNA Oligomer
auuuugaaucacuucucca

SEQ ID NO: 2502 - RNA, 19 nt, artificial
  siRNA Oligomer
uaggacccuucaaucacug

SEQ ID NO: 2503 - RNA, 19 nt, artificial
  siRNA Oligomer
ucccauucaauucuguaca

SEQ ID NO: 2504 - RNA, 19 nt, artificial
  siRNA Oligomer
ucaaauauuaccucguuga

SEQ ID NO: 2505 - RNA, 19 nt, artificial
  siRNA Oligomer
uucccagaaaagcccagag

SEQ ID NO: 2506 - RNA, 19 nt, artificial
  siRNA Oligomer
uaacacaaccucgcaagcc

SEQ ID NO: 2507 - RNA, 19 nt, artificial
  siRNA Oligomer
agcaguuccauuauugccg

SEQ ID NO: 2508 - RNA, 19 nt, artificial
  siRNA Oligomer
uuccaaucagugaguaaag

SEQ ID NO: 2509 - RNA, 19 nt, artificial
  siRNA Oligomer
ucuacuaaagaaaaagucc

SEQ ID NO: 2510 - RNA, 19 nt, artificial
  siRNA Oligomer
auuacuaagugaaucagag

SEQ ID NO: 2511 - RNA, 19 nt, artificial
  siRNA Oligomer
aucccauucaauucuguac

SEQ ID NO: 2512 - RNA, 19 nt, artificial
  siRNA Oligomer
uaaggccuuuauuauuccc

SEQ ID NO: 2513 - RNA, 19 nt, artificial
  siRNA Oligomer
uuuccuauccucacaggua

SEQ ID NO: 2514 - RNA, 19 nt, artificial
  siRNA Oligomer
ucccuagugacagguaucc

SEQ ID NO: 2515 - RNA, 19 nt, artificial
  siRNA Oligomer
aaaaagucccugaagcuag

SEQ ID NO: 2516 - RNA, 19 nt, artificial
  siRNA Oligomer
uuggcuuuguaguaucuuu

SEQ ID NO: 2517 - RNA, 19 nt, artificial
  siRNA Oligomer
uuacugaaauggcaccaca

SEQ ID NO: 2518 - RNA, 19 nt, artificial
  siRNA Oligomer
uaucuuggcccaauucuau

SEQ ID NO: 2519 - RNA, 19 nt, artificial
  siRNA Oligomer
uaccaagccuaccugaaac

SEQ ID NO: 2520 - RNA, 19 nt, artificial
  siRNA Oligomer
aagcuccuuauccacgacc

SEQ ID NO: 2521 - RNA, 19 nt, artificial
  siRNA Oligomer
uccauaagccaucaccauu

SEQ ID NO: 2522 - RNA, 19 nt, artificial
  siRNA Oligomer
cugaaauggcaccacaagc

SEQ ID NO: 2523 - RNA, 19 nt, artificial
  siRNA Oligomer
ucaucugagauuaagcaca

SEQ ID NO: 2524 - RNA, 19 nt, artificial
  siRNA Oligomer
uucuacuuuugcuuaccua

SEQ ID NO: 2525 - RNA, 19 nt, artificial
  siRNA Oligomer
uccaaaggccagaaaauca

SEQ ID NO: 2526 - RNA, 19 nt, artificial
  siRNA Oligomer
acaucgaugcccaagaagc

SEQ ID NO: 2527 - RNA, 19 nt, artificial
  siRNA Oligomer
ugcaugguuaucuggacgg

SEQ ID NO: 2528 - RNA, 19 nt, artificial
  siRNA Oligomer
ucugggugcaugcaugguu

SEQ ID NO: 2529 - RNA, 19 nt, artificial
  siRNA Oligomer
acuuaauccuaccuuccug

SEQ ID NO: 2530 - RNA, 19 nt, artificial
  siRNA Oligomer
auuuaucuuggcccaauuc

SEQ ID NO: 2531 - RNA, 19 nt, artificial
  siRNA Oligomer
acuaauuuccuauccucac

SEQ ID NO: 2532 - RNA, 19 nt, artificial
  siRNA Oligomer
auccaagguggaaaaaauc

SEQ ID NO: 2533 - RNA, 19 nt, artificial
  siRNA Oligomer
aaaaaaucugggugcaugc

SEQ ID NO: 2534 - RNA, 19 nt, artificial
  siRNA Oligomer
gucaaaaucacuuagcagg

SEQ ID NO: 2535 - RNA, 19 nt, artificial
  siRNA Oligomer
ucaggaacaacauaauccc

SEQ ID NO: 2536 - RNA, 19 nt, artificial
  siRNA Oligomer
uuuguaagcauaacaggca

SEQ ID NO: 2537 - RNA, 19 nt, artificial
  siRNA Oligomer
ugacagguauccaaggugg

SEQ ID NO: 2538 - RNA, 19 nt, artificial
  siRNA Oligomer
aucacuucuccaaaggcca

SEQ ID NO: 2539 - RNA, 19 nt, artificial
  siRNA Oligomer
aaaaaugggaucuaugcag

SEQ ID NO: 2540 - RNA, 19 nt, artificial
  siRNA Oligomer
auuaccucguugagguugg

SEQ ID NO: 2541 - RNA, 19 nt, artificial
  siRNA Oligomer
auucucugggucaguuucu

SEQ ID NO: 2542 - RNA, 19 nt, artificial
  siRNA Oligomer
uagagugaggaagucacca

SEQ ID NO: 2543 - RNA, 19 nt, artificial
  siRNA Oligomer
aaggccuuuauuauucccu

SEQ ID NO: 2544 - RNA, 19 nt, artificial
  siRNA Oligomer
auuuuguaagcauaacagg

SEQ ID NO: 2545 - RNA, 19 nt, artificial
  siRNA Oligomer
ucaaaugggcuucuacuuu

SEQ ID NO: 2546 - RNA, 19 nt, artificial
  siRNA Oligomer
aaucccaguagucaaaauc

SEQ ID NO: 2547 - RNA, 19 nt, artificial
  siRNA Oligomer
uaacagccuuccauaagcc

SEQ ID NO: 2548 - RNA, 19 nt, artificial
  siRNA Oligomer
uaguggaaaaaggacaaca

SEQ ID NO: 2549 - RNA, 19 nt, artificial
  siRNA Oligomer
auacaucugucccuacgcc

SEQ ID NO: 2550 - RNA, 19 nt, artificial
  siRNA Oligomer
uaugcagaaaaucuacacu

SEQ ID NO: 2551 - RNA, 19 nt, artificial
  siRNA Oligomer
uagugacagguauccaagg

SEQ ID NO: 2552 - RNA, 19 nt, artificial
  siRNA Oligomer
caagguggaaaaaaucugg

SEQ ID NO: 2553 - RNA, 19 nt, artificial
  siRNA Oligomer
ucucauuuacucuuaccua

SEQ ID NO: 2554 - RNA, 19 nt, artificial
  siRNA Oligomer
uuucuuauuuagggcaggu

SEQ ID NO: 2555 - RNA, 19 nt, artificial
  siRNA Oligomer
aacuaauuuccuauccuca

SEQ ID NO: 2556 - RNA, 19 nt, artificial
  siRNA Oligomer
acuuagagaaaaaaaagcc

SEQ ID NO: 2557 - RNA, 19 nt, artificial
  siRNA Oligomer
uucccuuuuuaggacccuu

SEQ ID NO: 2558 - RNA, 19 nt, artificial
  siRNA Oligomer
uuccaaguucacgugcaua

SEQ ID NO: 2559 - RNA, 19 nt, artificial
  siRNA Oligomer
uauagucuauuaccaagcc

SEQ ID NO: 2560 - RNA, 19 nt, artificial
  siRNA Oligomer
guugcaaccauggucaacg

SEQ ID NO: 2561 - RNA, 19 nt, artificial
  siRNA Oligomer
uggagcuuaacaauagaca

SEQ ID NO: 2562 - RNA, 19 nt, artificial
  siRNA Oligomer
acaaaaaugggaucuaugc

SEQ ID NO: 2563 - RNA, 19 nt, artificial
  siRNA Oligomer
augcagacuucguaaauug

SEQ ID NO: 2564 - RNA, 19 nt, artificial
  siRNA Oligomer
acuuuugcuuaccuauucc

SEQ ID NO: 2565 - RNA, 19 nt, artificial
  siRNA Oligomer
uacaaaugacuuuagcuga

SEQ ID NO: 2566 - RNA, 19 nt, artificial
  siRNA Oligomer
acacacaauccuauccagc

SEQ ID NO: 2567 - RNA, 19 nt, artificial
  siRNA Oligomer
cuacuuaauccuaccuucc

SEQ ID NO: 2568 - RNA, 19 nt, artificial
  siRNA Oligomer
uucauucucuaggcuguac

SEQ ID NO: 2569 - RNA, 19 nt, artificial
  siRNA Oligomer
uagguacgacgcuagaauc

SEQ ID NO: 2570 - RNA, 19 nt, artificial
  siRNA Oligomer
aucagagagggacuagauc

SEQ ID NO: 2571 - RNA, 19 nt, artificial
  siRNA Oligomer
aacccuucaaauuugaguc

SEQ ID NO: 2572 - RNA, 19 nt, artificial
  siRNA Oligomer
uugaacauuguugagugga

SEQ ID NO: 2573 - RNA, 19 nt, artificial
  siRNA Oligomer
ucuaugcagaaaaucuaca

SEQ ID NO: 2574 - RNA, 19 nt, artificial
  siRNA Oligomer
auaagcuccuuauccacga

SEQ ID NO: 2575 - RNA, 19 nt, artificial
  siRNA Oligomer
acuauaaaccauaucucca

SEQ ID NO: 2576 - RNA, 19 nt, artificial
  siRNA Oligomer
auucaaagugguaguauac

SEQ ID NO: 2577 - RNA, 19 nt, artificial
  siRNA Oligomer
uugcaaccauggucaacgg

SEQ ID NO: 2578 - RNA, 19 nt, artificial
  siRNA Oligomer
ugcuuaccuauuccauccc

SEQ ID NO: 2579 - RNA, 19 nt, artificial
  siRNA Oligomer
ugacccguuucaauaauuc

SEQ ID NO: 2580 - RNA, 19 nt, artificial
  siRNA Oligomer
auaaaccauaucuccauag

SEQ ID NO: 2581 - RNA, 19 nt, artificial
  siRNA Oligomer
ugaaucacuucuccaaagg

SEQ ID NO: 2582 - RNA, 19 nt, artificial
  siRNA Oligomer
uguaaaacucaaaugggcu

SEQ ID NO: 2583 - RNA, 19 nt, artificial
  siRNA Oligomer
uagaaucacacacaauccu

SEQ ID NO: 2584 - RNA, 19 nt, artificial
  siRNA Oligomer
uguaguaucuuuccaagca

SEQ ID NO: 2585 - RNA, 19 nt, artificial
  siRNA Oligomer
auuugagucaggaacuggu

SEQ ID NO: 2586 - RNA, 19 nt, artificial
  siRNA Oligomer
aaaccauaucuccauagcc

SEQ ID NO: 2587 - RNA, 19 nt, artificial
  siRNA Oligomer
uaacuguuaguggaaaaag

SEQ ID NO: 2588 - RNA, 19 nt, artificial
  siRNA Oligomer
aagguggaaaaaaucuggg

SEQ ID NO: 2589 - RNA, 19 nt, artificial
  siRNA Oligomer
auuuucccuuuuuaggacc

SEQ ID NO: 2590 - RNA, 19 nt, artificial
  siRNA Oligomer
aagaaaaagucccugaagc

SEQ ID NO: 2591 - RNA, 19 nt, artificial
  siRNA Oligomer
uuguugccucuuuaaaaca

SEQ ID NO: 2592 - RNA, 19 nt, artificial
  siRNA Oligomer
auaaggccuuuauuauucc

SEQ ID NO: 2593 - RNA, 19 nt, artificial
  siRNA Oligomer
agcuuaacaauagacaugc

SEQ ID NO: 2594 - RNA, 19 nt, artificial
  siRNA Oligomer
uucucagggacaaggaccu

SEQ ID NO: 2595 - RNA, 19 nt, artificial
  siRNA Oligomer
uccucacagguauucauca

SEQ ID NO: 2596 - RNA, 19 nt, artificial
  siRNA Oligomer
ucaaagugguaguauacag

SEQ ID NO: 2597 - RNA, 19 nt, artificial
  siRNA Oligomer
aucuaugcagaaaaucuac

SEQ ID NO: 2598 - RNA, 19 nt, artificial
  siRNA Oligomer
uccaaguucacgugcauaa

SEQ ID NO: 2599 - RNA, 19 nt, artificial
  siRNA Oligomer
aauucucugggucaguuuc

SEQ ID NO: 2600 - RNA, 19 nt, artificial
  siRNA Oligomer
aauuugagucaggaacugg

SEQ ID NO: 2601 - RNA, 19 nt, artificial
  siRNA Oligomer
uggucaacggcucuguuuc

SEQ ID NO: 2602 - RNA, 19 nt, artificial
  siRNA Oligomer
auuuggacagacaguucuc

SEQ ID NO: 2603 - RNA, 19 nt, artificial
  siRNA Oligomer
uuauuauucccuagugaca

SEQ ID NO: 2604 - RNA, 19 nt, artificial
  siRNA Oligomer
auucaucauucacucaaug

SEQ ID NO: 2605 - RNA, 19 nt, artificial
  siRNA Oligomer
uuucauucucuaggcugua

SEQ ID NO: 2606 - RNA, 19 nt, artificial
  siRNA Oligomer
cugaggaucagaguucucc

SEQ ID NO: 2607 - RNA, 19 nt, artificial
  siRNA Oligomer
uccucaaauauuaccucgu

SEQ ID NO: 2608 - RNA, 19 nt, artificial
  siRNA Oligomer
acuaaagaaaaagucccug

SEQ ID NO: 2609 - RNA, 19 nt, artificial
  siRNA Oligomer
aauggaagaguaaucaacu

SEQ ID NO: 2610 - RNA, 19 nt, artificial
  siRNA Oligomer
cuucaaucacuguuguucc

SEQ ID NO: 2611 - RNA, 19 nt, artificial
  siRNA Oligomer
ucaacggcucuguuuccuu

SEQ ID NO: 2612 - RNA, 19 nt, artificial
  siRNA Oligomer
ucuauaaagauuggcuuug

SEQ ID NO: 2613 - RNA, 19 nt, artificial
  siRNA Oligomer
uucguaaauugacccguuu

SEQ ID NO: 2614 - RNA, 19 nt, artificial
  siRNA Oligomer
ucgaugcccaagaagccuu

SEQ ID NO: 2615 - RNA, 19 nt, artificial
  siRNA Oligomer
ucugggucaguuucucagg

SEQ ID NO: 2616 - RNA, 19 nt, artificial
  siRNA Oligomer
aucuccauagccaaugcag

SEQ ID NO: 2617 - RNA, 19 nt, artificial
  siRNA Oligomer
gcuagaaucacacacaauc

SEQ ID NO: 2618 - RNA, 19 nt, artificial
  siRNA Oligomer
augacuuuagcugacuagc

SEQ ID NO: 2619 - RNA, 19 nt, artificial
  siRNA Oligomer
aguaacaccaggaugaaua

SEQ ID NO: 2620 - RNA, 19 nt, artificial
  siRNA Oligomer
cugaauaguuuuacuaccc

SEQ ID NO: 2621 - RNA, 19 nt, artificial
  siRNA Oligomer
ucuaaaacaacaccguggu

SEQ ID NO: 2622 - RNA, 19 nt, artificial
  siRNA Oligomer
agagagucaaagauaacug

SEQ ID NO: 2623 - RNA, 19 nt, artificial
  siRNA Oligomer
uaccugaaaccaaauugug

SEQ ID NO: 2624 - RNA, 19 nt, artificial
  siRNA Oligomer
uaguuuuacuacccaauca

SEQ ID NO: 2625 - RNA, 19 nt, artificial
  siRNA Oligomer
uacaucgaugcccaagaag

SEQ ID NO: 2626 - RNA, 19 nt, artificial
  siRNA Oligomer
cuucaauucccagaaaagc

SEQ ID NO: 2627 - RNA, 19 nt, artificial
  siRNA Oligomer
cuagaaucacacacaaucc

SEQ ID NO: 2628 - RNA, 19 nt, artificial
  siRNA Oligomer
uccauagccaaugcagacu

SEQ ID NO: 2629 - RNA, 19 nt, artificial
  siRNA Oligomer
uaaagauuggcuuuguagu

SEQ ID NO: 2630 - RNA, 19 nt, artificial
  siRNA Oligomer
augcagaaaaucuacacua

SEQ ID NO: 2631 - RNA, 19 nt, artificial
  siRNA Oligomer
aaugggcuucuacuuuugc

SEQ ID NO: 2632 - RNA, 19 nt, artificial
  siRNA Oligomer
agacuucguaaauugaccc

SEQ ID NO: 2633 - RNA, 19 nt, artificial
  siRNA Oligomer
aucgaugcccaagaagccu

SEQ ID NO: 2634 - RNA, 19 nt, artificial
  siRNA Oligomer
aucacuguuguuccaauca

SEQ ID NO: 2635 - RNA, 19 nt, artificial
  siRNA Oligomer
augaaagccuugcugaauu

SEQ ID NO: 2636 - RNA, 19 nt, artificial
  siRNA Oligomer
cucacagguauucaucauu

SEQ ID NO: 2637 - RNA, 19 nt, artificial
  siRNA Oligomer
uuccuauccucacagguau

SEQ ID NO: 2638 - RNA, 19 nt, artificial
  siRNA Oligomer
uuuacuacccaaucaugaa

SEQ ID NO: 2639 - RNA, 19 nt, artificial
  siRNA Oligomer
auaaagauuggcuuuguag

SEQ ID NO: 2640 - RNA, 19 nt, artificial
  siRNA Oligomer
aaaaucacuuagcaggcuc

SEQ ID NO: 2641 - RNA, 19 nt, artificial
  siRNA Oligomer
uuuacucuuaccuaggguu

SEQ ID NO: 2642 - RNA, 19 nt, artificial
  siRNA Oligomer
uuacucuuaccuaggguua

SEQ ID NO: 2643 - RNA, 19 nt, artificial
  siRNA Oligomer
auaagccaucaccauuuug

SEQ ID NO: 2644 - RNA, 19 nt, artificial
  siRNA Oligomer
uuguuagaacacuggcuaa

SEQ ID NO: 2645 - RNA, 19 nt, artificial
  siRNA Oligomer
uggaaaaaggacaacaguu

SEQ ID NO: 2646 - RNA, 19 nt, artificial
  siRNA Oligomer
uccagcaauucugaaaugc

SEQ ID NO: 2647 - RNA, 19 nt, artificial
  siRNA Oligomer
uaagcucaaaaguagguac

SEQ ID NO: 2648 - RNA, 19 nt, artificial
  siRNA Oligomer
cuuugauuuggacagacag

SEQ ID NO: 2649 - RNA, 19 nt, artificial
  siRNA Oligomer
uacuuaguuggaauaagac

SEQ ID NO: 2650 - RNA, 19 nt, artificial
  siRNA Oligomer
uucuccugcuuaaacacaa

SEQ ID NO: 2651 - RNA, 19 nt, artificial
  siRNA Oligomer
uuuuaaccaaauucuggca

SEQ ID NO: 2652 - RNA, 19 nt, artificial
  siRNA Oligomer
ugccucuuuaaaacauuag

SEQ ID NO: 2653 - RNA, 19 nt, artificial
  siRNA Oligomer
aaauccucugaaaacuuag

SEQ ID NO: 2654 - RNA, 19 nt, artificial
  siRNA Oligomer
cuaggcuguacuauaaacc

SEQ ID NO: 2655 - RNA, 19 nt, artificial
  siRNA Oligomer
cuuaauccuaccuuccugu

SEQ ID NO: 2656 - RNA, 19 nt, artificial
  siRNA Oligomer
uucuccugaaaccagagga

SEQ ID NO: 2657 - RNA, 19 nt, artificial
  siRNA Oligomer
aaaggcaucuaaaacaaca

SEQ ID NO: 2658 - RNA, 19 nt, artificial
  siRNA Oligomer
uuacuaagugaaucagaga

SEQ ID NO: 2659 - RNA, 19 nt, artificial
  siRNA Oligomer
aucccaguagucaaaauca

SEQ ID NO: 2660 - RNA, 19 nt, artificial
  siRNA Oligomer
aucacuuagcaggcucucu

SEQ ID NO: 2661 - RNA, 19 nt, artificial
  siRNA Oligomer
ccuuccauaagccaucacc

SEQ ID NO: 2662 - RNA, 19 nt, artificial
  siRNA Oligomer
acagcuacuacccuugaca

SEQ ID NO: 2663 - RNA, 19 nt, artificial
  siRNA Oligomer
ugaaaccagaggagaagcg

SEQ ID NO: 2664 - RNA, 19 nt, artificial
  siRNA Oligomer
uagacaugcaaaacaacau

SEQ ID NO: 2665 - RNA, 19 nt, artificial
  siRNA Oligomer
aaaguagguacgacgcuag

SEQ ID NO: 2666 - RNA, 19 nt, artificial
  siRNA Oligomer
ugcaugcaugguuaucugg

SEQ ID NO: 2667 - RNA, 19 nt, artificial
  siRNA Oligomer
uggugugggcuuuuggaag

SEQ ID NO: 2668 - RNA, 19 nt, artificial
  siRNA Oligomer
aagagagucaaagauaacu

SEQ ID NO: 2669 - RNA, 19 nt, artificial
  siRNA Oligomer
acaguauucaacacuuaag

SEQ ID NO: 2670 - RNA, 19 nt, artificial
  siRNA Oligomer
guuagcugcaguugcuaug

SEQ ID NO: 2671 - RNA, 19 nt, artificial
  siRNA Oligomer
auucugaaaugcuggccgg

SEQ ID NO: 2672 - RNA, 19 nt, artificial
  siRNA Oligomer
acauugauuuaucuuggcc

SEQ ID NO: 2673 - RNA, 19 nt, artificial
  siRNA Oligomer
uccauuauugccguaauau

SEQ ID NO: 2674 - RNA, 19 nt, artificial
  siRNA Oligomer
aacauuagagugaggaagu

SEQ ID NO: 2675 - RNA, 19 nt, artificial
  siRNA Oligomer
aauccuauccagcuuuuua

SEQ ID NO: 2676 - RNA, 19 nt, artificial
  siRNA Oligomer
uuggguucaggaacaacau

SEQ ID NO: 2677 - RNA, 19 nt, artificial
  siRNA Oligomer
ucagaguucuccugaaacc

SEQ ID NO: 2678 - RNA, 19 nt, artificial
  siRNA Oligomer
acugccaguugcaaccaug

SEQ ID NO: 2679 - RNA, 19 nt, artificial
  siRNA Oligomer
uuaccaagccuaccugaaa

SEQ ID NO: 2680 - RNA, 19 nt, artificial
  siRNA Oligomer
uaucaguaacaggaucaca

SEQ ID NO: 2681 - RNA, 19 nt, artificial
  siRNA Oligomer
uuacuacccaaucaugaaa

SEQ ID NO: 2682 - RNA, 19 nt, artificial
  siRNA Oligomer
uaccuuccugucuaaaaac

SEQ ID NO: 2683 - RNA, 19 nt, artificial
  siRNA Oligomer
uagcuagggcaggaaaccu

SEQ ID NO: 2684 - RNA, 19 nt, artificial
  siRNA Oligomer
gcugaauugaacauuguug

SEQ ID NO: 2685 - RNA, 19 nt, artificial
  siRNA Oligomer
auguaauacugaaaagagg

SEQ ID NO: 2686 - RNA, 19 nt, artificial
  siRNA Oligomer
uacagcuacuacccuugac

SEQ ID NO: 2687 - RNA, 19 nt, artificial
  siRNA Oligomer
aaagacaguauucaacacu

SEQ ID NO: 2688 - RNA, 19 nt, artificial
  siRNA Oligomer
ccuucaaucacuguuguuc

SEQ ID NO: 2689 - RNA, 19 nt, artificial
  siRNA Oligomer
uguaauacugaaaagagga

SEQ ID NO: 2690 - RNA, 19 nt, artificial
  siRNA Oligomer
uucuggcaaguugauuccu

SEQ ID NO: 2691 - RNA, 19 nt, artificial
  siRNA Oligomer
augcaugguuaucuggacg

SEQ ID NO: 2692 - RNA, 19 nt, artificial
  siRNA Oligomer
aacuguuaguggaaaaagg

SEQ ID NO: 2693 - RNA, 19 nt, artificial
  siRNA Oligomer
uccaucccauucaauucug

SEQ ID NO: 2694 - RNA, 19 nt, artificial
  siRNA Oligomer
uucuccaaaggccagaaaa

SEQ ID NO: 2695 - RNA, 19 nt, artificial
  siRNA Oligomer
acuaagugaaucagagagg

SEQ ID NO: 2696 - RNA, 19 nt, artificial
  siRNA Oligomer
aagugaaucagagagggac

SEQ ID NO: 2697 - RNA, 19 nt, artificial
  siRNA Oligomer
uuucccuuuuuaggacccu

SEQ ID NO: 2698 - RNA, 19 nt, artificial
  siRNA Oligomer
aucuuggcccaauucuaua

SEQ ID NO: 2699 - RNA, 19 nt, artificial
  siRNA Oligomer
aucagaguucuccugaaac

SEQ ID NO: 2700 - RNA, 19 nt, artificial
  siRNA Oligomer
gugaaguggagcuaauagc

SEQ ID NO: 2701 - RNA, 19 nt, artificial
  siRNA Oligomer
auugauuuaucuuggccca

SEQ ID NO: 2702 - RNA, 19 nt, artificial
  siRNA Oligomer
aaacccuucaaauuugagu

SEQ ID NO: 2703 - RNA, 19 nt, artificial
  siRNA Oligomer
cagaaaaucagccuguuag

SEQ ID NO: 2704 - RNA, 19 nt, artificial
  siRNA Oligomer
cuugcugaauugaacauug

SEQ ID NO: 2705 - RNA, 19 nt, artificial
  siRNA Oligomer
cuguuuuucaguaacacca

SEQ ID NO: 2706 - RNA, 19 nt, artificial
  siRNA Oligomer
ugagguuggguucaggaac

SEQ ID NO: 2707 - RNA, 19 nt, artificial
  siRNA Oligomer
ugaggaucagaguucuccu

SEQ ID NO: 2708 - RNA, 19 nt, artificial
  siRNA Oligomer
uuuaaccaaauucuggcaa

SEQ ID NO: 2709 - RNA, 19 nt, artificial
  siRNA Oligomer
uucaaagugguaguauaca

SEQ ID NO: 2710 - RNA, 19 nt, artificial
  siRNA Oligomer
uuuucaguaacaccaggau

SEQ ID NO: 2711 - RNA, 19 nt, artificial
  siRNA Oligomer
aaaaucagccuguuagcug

SEQ ID NO: 2712 - RNA, 19 nt, artificial
  siRNA Oligomer
aaaagagacuacauuuggg

SEQ ID NO: 2713 - RNA, 19 nt, artificial
  siRNA Oligomer
aaucugggugcaugcaugg

SEQ ID NO: 2714 - RNA, 19 nt, artificial
  siRNA Oligomer
uuccauaagccaucaccau

SEQ ID NO: 2715 - RNA, 19 nt, artificial
  siRNA Oligomer
ugccauggugaaaugguuc

SEQ ID NO: 2716 - RNA, 19 nt, artificial
  siRNA Oligomer
uugagcaaccaaguuuagu

SEQ ID NO: 2717 - RNA, 19 nt, artificial
  siRNA Oligomer
augggaucuaugcagaaaa

SEQ ID NO: 2718 - RNA, 19 nt, artificial
  siRNA Oligomer
uagccaaugcagacuucgu

SEQ ID NO: 2719 - RNA, 19 nt, artificial
  siRNA Oligomer
aaggaaagagauaaugauc

SEQ ID NO: 2720 - RNA, 19 nt, artificial
  siRNA Oligomer
aaccauaucuccauagcca

SEQ ID NO: 2721 - RNA, 19 nt, artificial
  siRNA Oligomer
guaguauacagcuacuacc

SEQ ID NO: 2722 - RNA, 19 nt, artificial
  siRNA Oligomer
uugauuuaucuuggcccaa

SEQ ID NO: 2723 - RNA, 19 nt, artificial
  siRNA Oligomer
uacuacccuugacaauugg

SEQ ID NO: 2724 - RNA, 19 nt, artificial
  siRNA Oligomer
aagaggauagauuacuaag

SEQ ID NO: 2725 - RNA, 19 nt, artificial
  siRNA Oligomer
cuuccauaagccaucacca

SEQ ID NO: 2726 - RNA, 19 nt, artificial
  siRNA Oligomer
ucaguggugacaacuccag

SEQ ID NO: 2727 - RNA, 19 nt, artificial
  siRNA Oligomer
acuguuguuccaaucagug

SEQ ID NO: 2728 - RNA, 19 nt, artificial
  siRNA Oligomer
guucuugcugcucaaacug

SEQ ID NO: 2729 - RNA, 19 nt, artificial
  siRNA Oligomer
augaauacaucugucccua

SEQ ID NO: 2730 - RNA, 19 nt, artificial
  siRNA Oligomer
cccaauucuauaaagauug

SEQ ID NO: 2731 - RNA, 19 nt, artificial
  siRNA Oligomer
uguuaguggaaaaaggaca

SEQ ID NO: 2732 - RNA, 19 nt, artificial
  siRNA Oligomer
uauuuucccuuuuuaggac

SEQ ID NO: 2733 - RNA, 19 nt, artificial
  siRNA Oligomer
caaacugccaguugcaacc

SEQ ID NO: 2734 - RNA, 19 nt, artificial
  siRNA Oligomer
uuggaaguuuugauaggcu

SEQ ID NO: 2735 - RNA, 19 nt, artificial
  siRNA Oligomer
aagcauuugaagaguuuag

SEQ ID NO: 2736 - RNA, 19 nt, artificial
  siRNA Oligomer
cuagugacagguauccaag

SEQ ID NO: 2737 - RNA, 19 nt, artificial
  siRNA Oligomer
cucaaauauuaccucguug

SEQ ID NO: 2738 - RNA, 19 nt, artificial
  siRNA Oligomer
acgugcauaacacaaccuc

SEQ ID NO: 2739 - RNA, 19 nt, artificial
  siRNA Oligomer
uuaaccaaauucuggcaag

SEQ ID NO: 2740 - RNA, 19 nt, artificial
  siRNA Oligomer
aauggcaccacaagcuuuu

SEQ ID NO: 2741 - RNA, 19 nt, artificial
  siRNA Oligomer
aaggauaugaaagccuugc

SEQ ID NO: 2742 - RNA, 19 nt, artificial
  siRNA Oligomer
uuauucccuagugacaggu

SEQ ID NO: 2743 - RNA, 19 nt, artificial
  siRNA Oligomer
ugaaauggcaccacaagcu

SEQ ID NO: 2744 - RNA, 19 nt, artificial
  siRNA Oligomer
cuacuaaagaaaaaguccc

SEQ ID NO: 2745 - RNA, 19 nt, artificial
  siRNA Oligomer
cucauuuacucuuaccuag

SEQ ID NO: 2746 - RNA, 19 nt, artificial
  siRNA Oligomer
aagcucaaaaguagguacg

SEQ ID NO: 2747 - RNA, 19 nt, artificial
  siRNA Oligomer
auuggcuuuguaguaucuu

SEQ ID NO: 2748 - RNA, 19 nt, artificial
  siRNA Oligomer
aacaagucgaaauccugag

SEQ ID NO: 2749 - RNA, 19 nt, artificial
  siRNA Oligomer
uuggcccaauucuauaaag

SEQ ID NO: 2750 - RNA, 19 nt, artificial
  siRNA Oligomer
aauucuguacaaaaauggg

SEQ ID NO: 2751 - RNA, 19 nt, artificial
  siRNA Oligomer
uacugaaauggcaccacaa

SEQ ID NO: 2752 - RNA, 19 nt, artificial
  siRNA Oligomer
agaguaaucaacuacacac

SEQ ID NO: 2753 - RNA, 19 nt, artificial
  siRNA Oligomer
ucuaggcuguacuauaaac

SEQ ID NO: 2754 - RNA, 19 nt, artificial
  siRNA Oligomer
uugccguaauauuucucau

SEQ ID NO: 2755 - RNA, 19 nt, artificial
  siRNA Oligomer
gguggaaaaaaucugggug

SEQ ID NO: 2756 - RNA, 19 nt, artificial
  siRNA Oligomer
uucuguacaaaaaugggau

SEQ ID NO: 2757 - RNA, 19 nt, artificial
  siRNA Oligomer
ccacaguccagcaauucug

SEQ ID NO: 2758 - RNA, 19 nt, artificial
  siRNA Oligomer
aacauaaucccaguaguca

SEQ ID NO: 2759 - RNA, 19 nt, artificial
  siRNA Oligomer
uaguaucaguaacaggauc

SEQ ID NO: 2760 - RNA, 19 nt, artificial
  siRNA Oligomer
uaguuugcuuugauuugga

SEQ ID NO: 2761 - RNA, 19 nt, artificial
  siRNA Oligomer
auucccagaaaagcccaga

SEQ ID NO: 2762 - RNA, 19 nt, artificial
  siRNA Oligomer
caauucuguacaaaaaugg

SEQ ID NO: 2763 - RNA, 19 nt, artificial
  siRNA Oligomer
ucacuucuccaaaggccag

SEQ ID NO: 2764 - RNA, 19 nt, artificial
  siRNA Oligomer
ucucagaacuaauuuccua

SEQ ID NO: 2765 - RNA, 19 nt, artificial
  siRNA Oligomer
ugguucaucugagauuaag

SEQ ID NO: 2766 - RNA, 19 nt, artificial
  siRNA Oligomer
aucucagaacuaauuuccu

SEQ ID NO: 2767 - RNA, 19 nt, artificial
  siRNA Oligomer
auagucuauuaccaagccu

SEQ ID NO: 2768 - RNA, 19 nt, artificial
  siRNA Oligomer
cagcauuuuaaccaaauuc

SEQ ID NO: 2769 - RNA, 19 nt, artificial
  siRNA Oligomer
aauccuaccuuccugucua

SEQ ID NO: 2770 - RNA, 19 nt, artificial
  siRNA Oligomer
uuaaggagagauacuucaa

SEQ ID NO: 2771 - RNA, 19 nt, artificial
  siRNA Oligomer
acaggcaagagagucaaag

SEQ ID NO: 2772 - RNA, 19 nt, artificial
  siRNA Oligomer
ucucugggugauagccaca

SEQ ID NO: 2773 - RNA, 19 nt, artificial
  siRNA Oligomer
aagacaaaaaauaaggccu

SEQ ID NO: 2774 - RNA, 19 nt, artificial
  siRNA Oligomer
cagagaugagauaacacug

SEQ ID NO: 2775 - RNA, 19 nt, artificial
  siRNA Oligomer
ucucugggucaguuucuca

SEQ ID NO: 2776 - RNA, 19 nt, artificial
  siRNA Oligomer
guuggguucaggaacaaca

SEQ ID NO: 2777 - RNA, 19 nt, artificial
  siRNA Oligomer
uuaguggaaaaaggacaac

SEQ ID NO: 2778 - RNA, 19 nt, artificial
  siRNA Oligomer
aagcaguuccauuauugcc

SEQ ID NO: 2779 - RNA, 19 nt, artificial
  siRNA Oligomer
uugcugaauugaacauugu

SEQ ID NO: 2780 - RNA, 19 nt, artificial
  siRNA Oligomer
ugcucaaacugccaguugc

SEQ ID NO: 2781 - RNA, 19 nt, artificial
  siRNA Oligomer
ccuuccugucuaaaaaccc

SEQ ID NO: 2782 - RNA, 19 nt, artificial
  siRNA Oligomer
cucaccuacuuaauccuac

SEQ ID NO: 2783 - RNA, 19 nt, artificial
  siRNA Oligomer
aucuggacggugaguuuca

SEQ ID NO: 2784 - RNA, 19 nt, artificial
  siRNA Oligomer
aguaucaguaacaggauca

SEQ ID NO: 2785 - RNA, 19 nt, artificial
  siRNA Oligomer
uacuacccaaucaugaaau

SEQ ID NO: 2786 - RNA, 19 nt, artificial
  siRNA Oligomer
ugagcuuauaaaggcaucu

SEQ ID NO: 2787 - RNA, 19 nt, artificial
  siRNA Oligomer
aaauauuaccucguugagg

SEQ ID NO: 2788 - RNA, 19 nt, artificial
  siRNA Oligomer
ugaaccuuuggagcuuaac

SEQ ID NO: 2789 - RNA, 19 nt, artificial
  siRNA Oligomer
aguggagcuaauagcuagg

SEQ ID NO: 2790 - RNA, 19 nt, artificial
  siRNA Oligomer
ugaauacaucugucccuac

SEQ ID NO: 2791 - RNA, 19 nt, artificial
  siRNA Oligomer
augaaugugaaacacagaa

SEQ ID NO: 2792 - RNA, 19 nt, artificial
  siRNA Oligomer
gucuauuaccaagccuacc

SEQ ID NO: 2793 - RNA, 19 nt, artificial
  siRNA Oligomer
aguaacaggaucacaccug

SEQ ID NO: 2794 - RNA, 19 nt, artificial
  siRNA Oligomer
uuagcugacuagcugaaua

SEQ ID NO: 2795 - RNA, 19 nt, artificial
  siRNA Oligomer
uuccaagcauuugaagagu

SEQ ID NO: 2796 - RNA, 19 nt, artificial
  siRNA Oligomer
agucccugaagcuagucca

SEQ ID NO: 2797 - RNA, 19 nt, artificial
  siRNA Oligomer
auuuccaaguucacgugca

SEQ ID NO: 2798 - RNA, 19 nt, artificial
  siRNA Oligomer
caacaguucuacaucgaug

SEQ ID NO: 2799 - RNA, 19 nt, artificial
  siRNA Oligomer
uaaacacaaguguaagcuc

SEQ ID NO: 2800 - RNA, 19 nt, artificial
  siRNA Oligomer
uugcuaugaaugugaaaca

SEQ ID NO: 2801 - RNA, 19 nt, artificial
  siRNA Oligomer
uuaaaacauuagagugagg

SEQ ID NO: 2802 - RNA, 19 nt, artificial
  siRNA Oligomer
aaaggccagaaaaucagcc

SEQ ID NO: 2803 - RNA, 19 nt, artificial
  siRNA Oligomer
agauacuucaauucccaga

SEQ ID NO: 2804 - RNA, 19 nt, artificial
  siRNA Oligomer
acaaguguaagcucaaaag

SEQ ID NO: 2805 - RNA, 19 nt, artificial
  siRNA Oligomer
aagucaccaagaaacagug

SEQ ID NO: 2806 - RNA, 19 nt, artificial
  siRNA Oligomer
acacuggcuaauuugaaca

SEQ ID NO: 2807 - RNA, 19 nt, artificial
  siRNA Oligomer
ugccguaauauuucucauu

SEQ ID NO: 2808 - RNA, 19 nt, artificial
  siRNA Oligomer
augagauaacacugccaug

SEQ ID NO: 2809 - RNA, 19 nt, artificial
  siRNA Oligomer
cauuuuguaagcauaacag

SEQ ID NO: 2810 - RNA, 19 nt, artificial
  siRNA Oligomer
acagcaaggauaugaaagc

SEQ ID NO: 2811 - RNA, 19 nt, artificial
  siRNA Oligomer
acuacaaaugacuuuagcu

SEQ ID NO: 2812 - RNA, 19 nt, artificial
  siRNA Oligomer
uaugaaugugaaacacaga

SEQ ID NO: 2813 - RNA, 19 nt, artificial
  siRNA Oligomer
uguuagaacacuggcuaau

SEQ ID NO: 2814 - RNA, 19 nt, artificial
  siRNA Oligomer
acucaaaugggcuucuacu

SEQ ID NO: 2815 - RNA, 19 nt, artificial
  siRNA Oligomer
aacaccaggaugaauacau

SEQ ID NO: 2816 - RNA, 19 nt, artificial
  siRNA Oligomer
uggaagaguaaucaacuac

SEQ ID NO: 2817 - RNA, 19 nt, artificial
  siRNA Oligomer
uccuauccagcuuuuuaca

SEQ ID NO: 2818 - RNA, 19 nt, artificial
  siRNA Oligomer
acaauagacaugcaaaaca

SEQ ID NO: 2819 - RNA, 19 nt, artificial
  siRNA Oligomer
ucuuuccaagcauuugaag

SEQ ID NO: 2820 - RNA, 19 nt, artificial
  siRNA Oligomer
uuagcugcaguugcuauga

SEQ ID NO: 2821 - RNA, 19 nt, artificial
  siRNA Oligomer
aguuucauucucuaggcug

SEQ ID NO: 2822 - RNA, 19 nt, artificial
  siRNA Oligomer
uuccauuauugccguaaua

SEQ ID NO: 2823 - RNA, 19 nt, artificial
  siRNA Oligomer
agaaacacagugaaccuuu

SEQ ID NO: 2824 - RNA, 19 nt, artificial
  siRNA Oligomer
ucccaguagucaaaaucac

SEQ ID NO: 2825 - RNA, 19 nt, artificial
  siRNA Oligomer
ugggcuucuacuuuugcuu

SEQ ID NO: 2826 - RNA, 19 nt, artificial
  siRNA Oligomer
auagcuagggcaggaaacc

SEQ ID NO: 2827 - RNA, 19 nt, artificial
  siRNA Oligomer
aaacacagaaagaaaagag

SEQ ID NO: 2828 - RNA, 19 nt, artificial
  siRNA Oligomer
uggagcuaauagcuagggc

SEQ ID NO: 2829 - RNA, 19 nt, artificial
  siRNA Oligomer
agcaauucugaaaugcugg

SEQ ID NO: 2830 - RNA, 19 nt, artificial
  siRNA Oligomer
uacuaaagaaaaagucccu

SEQ ID NO: 2831 - RNA, 19 nt, artificial
  siRNA Oligomer
agaaaagagacuacauuug

SEQ ID NO: 2832 - RNA, 19 nt, artificial
  siRNA Oligomer
caacauugauuuaucuugg

SEQ ID NO: 2833 - RNA, 19 nt, artificial
  siRNA Oligomer
uccagcuuuuuacauacau

SEQ ID NO: 2834 - RNA, 19 nt, artificial
  siRNA Oligomer
ggcaucuaaaacaacaccg

SEQ ID NO: 2835 - RNA, 19 nt, artificial
  siRNA Oligomer
ccaagguggaaaaaaucug

SEQ ID NO: 2836 - RNA, 19 nt, artificial
  siRNA Oligomer
aaaugggcuucuacuuuug

SEQ ID NO: 2837 - RNA, 19 nt, artificial
  siRNA Oligomer
ucuuggcccaauucuauaa

SEQ ID NO: 2838 - RNA, 19 nt, artificial
  siRNA Oligomer
accuacuuaauccuaccuu

SEQ ID NO: 2839 - RNA, 19 nt, artificial
  siRNA Oligomer
aaccugaauaagcuccuua

SEQ ID NO: 2840 - RNA, 19 nt, artificial
  siRNA Oligomer
aaggcaucuaaaacaacac

SEQ ID NO: 2841 - RNA, 19 nt, artificial
  siRNA Oligomer
aauagcuagggcaggaaac

SEQ ID NO: 2842 - RNA, 19 nt, artificial
  siRNA Oligomer
uaugaaagccuugcugaau

SEQ ID NO: 2843 - RNA, 19 nt, artificial
  siRNA Oligomer
ccuaccugaaaccaaauug

SEQ ID NO: 2844 - RNA, 19 nt, artificial
  siRNA Oligomer
uaaaggcaucuaaaacaac

SEQ ID NO: 2845 - RNA, 19 nt, artificial
  siRNA Oligomer
auaucuccauagccaaugc

SEQ ID NO: 2846 - RNA, 19 nt, artificial
  siRNA Oligomer
cucugggucaguuucucag

SEQ ID NO: 2847 - RNA, 19 nt, artificial
  siRNA Oligomer
ucaccauuuuguaagcaua

SEQ ID NO: 2848 - RNA, 19 nt, artificial
  siRNA Oligomer
ugagcaaccaaguuuaguu

SEQ ID NO: 2849 - RNA, 19 nt, artificial
  siRNA Oligomer
uaguaucuuuccaagcauu

SEQ ID NO: 2850 - RNA, 19 nt, artificial
  siRNA Oligomer
ugcuuugauuuggacagac

SEQ ID NO: 2851 - RNA, 19 nt, artificial
  siRNA Oligomer
auagccacaguccagcaau

SEQ ID NO: 2852 - RNA, 21 nt, artificial
  siRNA Oligomer
gccaguguucuaacaaacuaa

SEQ ID NO: 2853 - RNA, 21 nt, artificial
  siRNA Oligomer
ggauggaauagguaagcaaaa

SEQ ID NO: 2854 - RNA, 21 nt, artificial
  siRNA Oligomer
ggauuaaguaggugaguuuaa

SEQ ID NO: 2855 - RNA, 21 nt, artificial
  siRNA Oligomer
ccaccugcccuaaauaagaaa

SEQ ID NO: 2856 - RNA, 21 nt, artificial
  siRNA Oligomer
caguguucuaacaaacuaaac

SEQ ID NO: 2857 - RNA, 21 nt, artificial
  siRNA Oligomer
cagugauugaaggguccuaaa

SEQ ID NO: 2858 - RNA, 21 nt, artificial
  siRNA Oligomer
gcuggagaacugucuguccaa

SEQ ID NO: 2859 - RNA, 21 nt, artificial
  siRNA Oligomer
gagugaaugaugaauaccugu

SEQ ID NO: 2860 - RNA, 21 nt, artificial
  siRNA Oligomer
ggauuucgacuuguuaagaaa

SEQ ID NO: 2861 - RNA, 21 nt, artificial
  siRNA Oligomer
ggaaauuaguucugagaucua

SEQ ID NO: 2862 - RNA, 21 nt, artificial
  siRNA Oligomer
acgugaacuuggaaauugaaa

SEQ ID NO: 2863 - RNA, 21 nt, artificial
  siRNA Oligomer
uagccaguguucuaacaaacu

SEQ ID NO: 2864 - RNA, 21 nt, artificial
  siRNA Oligomer
cauccugguguuacugaaaaa

SEQ ID NO: 2865 - RNA, 21 nt, artificial
  siRNA Oligomer
agccaguguucuaacaaacua

SEQ ID NO: 2866 - RNA, 21 nt, artificial
  siRNA Oligomer
cgugaacuuggaaauugaaaa

SEQ ID NO: 2867 - RNA, 21 nt, artificial
  siRNA Oligomer
ugggcuuuucugggaauugaa

SEQ ID NO: 2868 - RNA, 21 nt, artificial
  siRNA Oligomer
ggaaagauacuacaaagccaa

SEQ ID NO: 2869 - RNA, 21 nt, artificial
  siRNA Oligomer
cacgugaacuuggaaauugaa

SEQ ID NO: 2870 - RNA, 21 nt, artificial
  siRNA Oligomer
gcacgugaacuuggaaauuga

SEQ ID NO: 2871 - RNA, 21 nt, artificial
  siRNA Oligomer
ggcuuauggaaggcuguuaaa

SEQ ID NO: 2872 - RNA, 21 nt, artificial
  siRNA Oligomer
ggagauaugguuuauaguaca

SEQ ID NO: 2873 - RNA, 21 nt, artificial
  siRNA Oligomer
gggauggaauagguaagcaaa

SEQ ID NO: 2874 - RNA, 21 nt, artificial
  siRNA Oligomer
caauguuguuuugcaugucua

SEQ ID NO: 2875 - RNA, 21 nt, artificial
  siRNA Oligomer
aguacagccuagagaaugaaa

SEQ ID NO: 2876 - RNA, 21 nt, artificial
  siRNA Oligomer
cuuuggagaagugauucaaaa

SEQ ID NO: 2877 - RNA, 21 nt, artificial
  siRNA Oligomer
ccuuuggagaagugauucaaa

SEQ ID NO: 2878 - RNA, 21 nt, artificial
  siRNA Oligomer
cagaauugaaugggauggaau

SEQ ID NO: 2879 - RNA, 21 nt, artificial
  siRNA Oligomer
ugggauggaauagguaagcaa

SEQ ID NO: 2880 - RNA, 21 nt, artificial
  siRNA Oligomer
ccagauuuuuuccaccuugga

SEQ ID NO: 2881 - RNA, 21 nt, artificial
  siRNA Oligomer
gaaggguccuaaaaagggaaa

SEQ ID NO: 2882 - RNA, 21 nt, artificial
  siRNA Oligomer
cuuccucacucuaauguuuua

SEQ ID NO: 2883 - RNA, 21 nt, artificial
  siRNA Oligomer
gaacugucuguccaaaucaaa

SEQ ID NO: 2884 - RNA, 21 nt, artificial
  siRNA Oligomer
caacaauguucaauucagcaa

SEQ ID NO: 2885 - RNA, 21 nt, artificial
  siRNA Oligomer
cuagguaagaguaaaugagaa

SEQ ID NO: 2886 - RNA, 21 nt, artificial
  siRNA Oligomer
agugauugaaggguccuaaaa

SEQ ID NO: 2887 - RNA, 21 nt, artificial
  siRNA Oligomer
gugauugaaggguccuaaaaa

SEQ ID NO: 2888 - RNA, 21 nt, artificial
  siRNA Oligomer
gaaugaugaauaccugugagg

SEQ ID NO: 2889 - RNA, 21 nt, artificial
  siRNA Oligomer
ccucucugauucacuuaguaa

SEQ ID NO: 2890 - RNA, 21 nt, artificial
  siRNA Oligomer
agauuuuuuccaccuuggaua

SEQ ID NO: 2891 - RNA, 21 nt, artificial
  siRNA Oligomer
gaauuuagccuccacucaaca

SEQ ID NO: 2892 - RNA, 21 nt, artificial
  siRNA Oligomer
gaauagguaagcaaaaguaga

SEQ ID NO: 2893 - RNA, 21 nt, artificial
  siRNA Oligomer
ggucguggauaaggagcuuau

SEQ ID NO: 2894 - RNA, 21 nt, artificial
  siRNA Oligomer
ggcuugguaauagacuauaua

SEQ ID NO: 2895 - RNA, 21 nt, artificial
  siRNA Oligomer
cugucacuagggaauaauaaa

SEQ ID NO: 2896 - RNA, 21 nt, artificial
  siRNA Oligomer
cuuggugacuuccucacucua

SEQ ID NO: 2897 - RNA, 21 nt, artificial
  siRNA Oligomer
ccuagguaagaguaaaugaga

SEQ ID NO: 2898 - RNA, 21 nt, artificial
  siRNA Oligomer
gcuuguggugccauuucagua

SEQ ID NO: 2899 - RNA, 21 nt, artificial
  siRNA Oligomer
gaugaauaccugugaggauag

SEQ ID NO: 2900 - RNA, 21 nt, artificial
  siRNA Oligomer
ggugugauccuguuacugaua

SEQ ID NO: 2901 - RNA, 21 nt, artificial
  siRNA Oligomer
gggucguggauaaggagcuua

SEQ ID NO: 2902 - RNA, 21 nt, artificial
  siRNA Oligomer
accuaaaaugucacuguucaa

SEQ ID NO: 2903 - RNA, 21 nt, artificial
  siRNA Oligomer
gauccuguuacugauacuaua

SEQ ID NO: 2904 - RNA, 21 nt, artificial
  siRNA Oligomer
caaagguccuugucccugaga

SEQ ID NO: 2905 - RNA, 21 nt, artificial
  siRNA Oligomer
aaauggugauggcuuauggaa

SEQ ID NO: 2906 - RNA, 21 nt, artificial
  siRNA Oligomer
cguagggacagauguauucau

SEQ ID NO: 2907 - RNA, 21 nt, artificial
  siRNA Oligomer
auagaauugggccaagauaaa

SEQ ID NO: 2908 - RNA, 21 nt, artificial
  siRNA Oligomer
gaaagauacuacaaagccaau

SEQ ID NO: 2909 - RNA, 21 nt, artificial
  siRNA Oligomer
gcuucagggacuuuuucuuua

SEQ ID NO: 2910 - RNA, 21 nt, artificial
  siRNA Oligomer
caugauuggguaguaaaacua

SEQ ID NO: 2911 - RNA, 21 nt, artificial
  siRNA Oligomer
aauuagccaguguucuaacaa

SEQ ID NO: 2912 - RNA, 21 nt, artificial
  siRNA Oligomer
ucagguaggcuugguaauaga

SEQ ID NO: 2913 - RNA, 21 nt, artificial
  siRNA Oligomer
ugaaugggauggaauagguaa

SEQ ID NO: 2914 - RNA, 21 nt, artificial
  siRNA Oligomer
cgguguuguuuuagaugccuu

SEQ ID NO: 2915 - RNA, 21 nt, artificial
  siRNA Oligomer
gguuucagguaggcuugguaa

SEQ ID NO: 2916 - RNA, 21 nt, artificial
  siRNA Oligomer
gcugauuuucuggccuuugga

SEQ ID NO: 2917 - RNA, 21 nt, artificial
  siRNA Oligomer
ccuccacucaacaauguucaa

SEQ ID NO: 2918 - RNA, 21 nt, artificial
  siRNA Oligomer
gcuguauacuaccacuuugaa

SEQ ID NO: 2919 - RNA, 21 nt, artificial
  siRNA Oligomer
cgaaggaaacagagccguuga

SEQ ID NO: 2920 - RNA, 21 nt, artificial
  siRNA Oligomer
ugagcuuacacuuguguuuaa

SEQ ID NO: 2921 - RNA, 21 nt, artificial
  siRNA Oligomer
cggcguagggacagauguauu

SEQ ID NO: 2922 - RNA, 21 nt, artificial
  siRNA Oligomer
agaauugaaugggauggaaua

SEQ ID NO: 2923 - RNA, 21 nt, artificial
  siRNA Oligomer
cagagagccugcuaagugauu

SEQ ID NO: 2924 - RNA, 21 nt, artificial
  siRNA Oligomer
uauagaauugggccaagauaa

SEQ ID NO: 2925 - RNA, 21 nt, artificial
  siRNA Oligomer
cucaggauuucgacuuguuaa

SEQ ID NO: 2926 - RNA, 21 nt, artificial
  siRNA Oligomer
cuucaaaugcuuggaaagaua

SEQ ID NO: 2927 - RNA, 21 nt, artificial
  siRNA Oligomer
gguccuaaaaagggaaaauau

SEQ ID NO: 2928 - RNA, 21 nt, artificial
  siRNA Oligomer
uggagaacugucuguccaaau

SEQ ID NO: 2929 - RNA, 21 nt, artificial
  siRNA Oligomer
gcucaggauuucgacuuguua

SEQ ID NO: 2930 - RNA, 21 nt, artificial
  siRNA Oligomer
gagccugcuaagugauuuuga

SEQ ID NO: 2931 - RNA, 21 nt, artificial
  siRNA Oligomer
ugaugaauaccugugaggaua

SEQ ID NO: 2932 - RNA, 21 nt, artificial
  siRNA Oligomer
gagaauuuagccuccacucaa

SEQ ID NO: 2933 - RNA, 21 nt, artificial
  siRNA Oligomer
ggccuuuggagaagugauuca

SEQ ID NO: 2934 - RNA, 21 nt, artificial
  siRNA Oligomer
ugaaggguuuuuagacaggaa

SEQ ID NO: 2935 - RNA, 21 nt, artificial
  siRNA Oligomer
gaggaaucaacuugccagaau

SEQ ID NO: 2936 - RNA, 21 nt, artificial
  siRNA Oligomer
aggauuucgacuuguuaagaa

SEQ ID NO: 2937 - RNA, 21 nt, artificial
  siRNA Oligomer
aguuccugacucaaauuugaa

SEQ ID NO: 2938 - RNA, 21 nt, artificial
  siRNA Oligomer
acaggaagguaggauuaagua

SEQ ID NO: 2939 - RNA, 21 nt, artificial
  siRNA Oligomer
cuugcugugggucguggauaa

SEQ ID NO: 2940 - RNA, 21 nt, artificial
  siRNA Oligomer
gcuggauaggauuguguguga

SEQ ID NO: 2941 - RNA, 21 nt, artificial
  siRNA Oligomer
uuauguuguuccugaacccaa

SEQ ID NO: 2942 - RNA, 21 nt, artificial
  siRNA Oligomer
ccuaaaaugucacuguucaaa

SEQ ID NO: 2943 - RNA, 21 nt, artificial
  siRNA Oligomer
gauaggaaauuaguucugaga

SEQ ID NO: 2944 - RNA, 21 nt, artificial
  siRNA Oligomer
guuucagguaggcuugguaau

SEQ ID NO: 2945 - RNA, 21 nt, artificial
  siRNA Oligomer
gauuuucuggccuuuggagaa

SEQ ID NO: 2946 - RNA, 21 nt, artificial
  siRNA Oligomer
cugugaggauaggaaauuagu

SEQ ID NO: 2947 - RNA, 21 nt, artificial
  siRNA Oligomer
gguaggcuugguaauagacua

SEQ ID NO: 2948 - RNA, 21 nt, artificial
  siRNA Oligomer
gaaugaaacucaccguccaga

SEQ ID NO: 2949 - RNA, 21 nt, artificial
  siRNA Oligomer
cguggauaaggagcuuauuca

SEQ ID NO: 2950 - RNA, 21 nt, artificial
  siRNA Oligomer
gugaaugaugaauaccuguga

SEQ ID NO: 2951 - RNA, 21 nt, artificial
  siRNA Oligomer
aauuuagccuccacucaacaa

SEQ ID NO: 2952 - RNA, 21 nt, artificial
  siRNA Oligomer
ggagaagugauucaaaauagu

SEQ ID NO: 2953 - RNA, 21 nt, artificial
  siRNA Oligomer
ccaccaguuccugacucaaau

SEQ ID NO: 2954 - RNA, 21 nt, artificial
  siRNA Oligomer
uagacaggaagguaggauuaa

SEQ ID NO: 2955 - RNA, 21 nt, artificial
  siRNA Oligomer
ugggauuauguuguuccugaa

SEQ ID NO: 2956 - RNA, 21 nt, artificial
  siRNA Oligomer
aauugggccaagauaaaucaa

SEQ ID NO: 2957 - RNA, 21 nt, artificial
  siRNA Oligomer
ggauaaggagcuuauucaggu

SEQ ID NO: 2958 - RNA, 21 nt, artificial
  siRNA Oligomer
auuagccaguguucuaacaaa

SEQ ID NO: 2959 - RNA, 21 nt, artificial
  siRNA Oligomer
uggcuauggagauaugguuua

SEQ ID NO: 2960 - RNA, 21 nt, artificial
  siRNA Oligomer
guccaaaucaaagcaaacuaa

SEQ ID NO: 2961 - RNA, 21 nt, artificial
  siRNA Oligomer
uggauaccugucacuagggaa

SEQ ID NO: 2962 - RNA, 21 nt, artificial
  siRNA Oligomer
ccaccuuggauaccugucacu

SEQ ID NO: 2963 - RNA, 21 nt, artificial
  siRNA Oligomer
augugcuuaaucucagaugaa

SEQ ID NO: 2964 - RNA, 21 nt, artificial
  siRNA Oligomer
ccauugagugaaugaugaaua

SEQ ID NO: 2965 - RNA, 21 nt, artificial
  siRNA Oligomer
ccuuuuuccacuaacaguuau

SEQ ID NO: 2966 - RNA, 21 nt, artificial
  siRNA Oligomer
ggucaauuuacgaagucugca

SEQ ID NO: 2967 - RNA, 21 nt, artificial
  siRNA Oligomer
cccucucugauucacuuagua

SEQ ID NO: 2968 - RNA, 21 nt, artificial
  siRNA Oligomer
cuguuguccuuuuuccacuaa

SEQ ID NO: 2969 - RNA, 21 nt, artificial
  siRNA Oligomer
ugcuuggaaagauacuacaaa

SEQ ID NO: 2970 - RNA, 21 nt, artificial
  siRNA Oligomer
caauucagcaaggcuuucaua

SEQ ID NO: 2971 - RNA, 21 nt, artificial
  siRNA Oligomer
gugugugauucuagcgucgua

SEQ ID NO: 2972 - RNA, 21 nt, artificial
  siRNA Oligomer
ccugcuaagugauuuugacua

SEQ ID NO: 2973 - RNA, 21 nt, artificial
  siRNA Oligomer
cucucuugccuguuaugcuua

SEQ ID NO: 2974 - RNA, 21 nt, artificial
  siRNA Oligomer
guuaugcacgugaacuuggaa

SEQ ID NO: 2975 - RNA, 21 nt, artificial
  siRNA Oligomer
caaaaguagaagcccauuuga

SEQ ID NO: 2976 - RNA, 21 nt, artificial
  siRNA Oligomer
gcuauuagcuccacuucacau

SEQ ID NO: 2977 - RNA, 21 nt, artificial
  siRNA Oligomer
aguugauuacucuuccauuga

SEQ ID NO: 2978 - RNA, 21 nt, artificial
  siRNA Oligomer
gaauuugguuaaaaugcugga

SEQ ID NO: 2979 - RNA, 21 nt, artificial
  siRNA Oligomer
gggcuuuucugggaauugaag

SEQ ID NO: 2980 - RNA, 21 nt, artificial
  siRNA Oligomer
uugccuguuaugcuuacaaaa

SEQ ID NO: 2981 - RNA, 21 nt, artificial
  siRNA Oligomer
gagguuguguuaugcacguga

SEQ ID NO: 2982 - RNA, 21 nt, artificial
  siRNA Oligomer
gaagcccauuugaguuuuaca

SEQ ID NO: 2983 - RNA, 21 nt, artificial
  siRNA Oligomer
ggcuuuucugggaauugaagu

SEQ ID NO: 2984 - RNA, 21 nt, artificial
  siRNA Oligomer
ccaaauguagucucuuuucuu

SEQ ID NO: 2985 - RNA, 21 nt, artificial
  siRNA Oligomer
agcuguauacuaccacuuuga

SEQ ID NO: 2986 - RNA, 21 nt, artificial
  siRNA Oligomer
uaaccaugcaugcacccagau

SEQ ID NO: 2987 - RNA, 21 nt, artificial
  siRNA Oligomer
cugggauuauguuguuccuga

SEQ ID NO: 2988 - RNA, 21 nt, artificial
  siRNA Oligomer
gggcaucgauguagaacuguu

SEQ ID NO: 2989 - RNA, 21 nt, artificial
  siRNA Oligomer
cugagaaacugacccagagaa

SEQ ID NO: 2990 - RNA, 21 nt, artificial
  siRNA Oligomer
gguguuguuuuagaugccuuu

SEQ ID NO: 2991 - RNA, 21 nt, artificial
  siRNA Oligomer
cuggcaguuugagcagcaaga

SEQ ID NO: 2992 - RNA, 21 nt, artificial
  siRNA Oligomer
cauuucaccauggcaguguua

SEQ ID NO: 2993 - RNA, 21 nt, artificial
  siRNA Oligomer
uuccauugagugaaugaugaa

SEQ ID NO: 2994 - RNA, 21 nt, artificial
  siRNA Oligomer
gguuguguuaugcacgugaac

SEQ ID NO: 2995 - RNA, 21 nt, artificial
  siRNA Oligomer
caguaaccacgguguuguuuu

SEQ ID NO: 2996 - RNA, 21 nt, artificial
  siRNA Oligomer
aggagaacugcucauggacua

SEQ ID NO: 2997 - RNA, 21 nt, artificial
  siRNA Oligomer
ccuguucuuaaguguugaaua

SEQ ID NO: 2998 - RNA, 21 nt, artificial
  siRNA Oligomer
ucauccugguguuacugaaaa

SEQ ID NO: 2999 - RNA, 21 nt, artificial
  siRNA Oligomer
ugaaggguccuaaaaagggaa

SEQ ID NO: 3000 - RNA, 21 nt, artificial
  siRNA Oligomer
gcuauggagauaugguuuaua

SEQ ID NO: 3001 - RNA, 21 nt, artificial
  siRNA Oligomer
uuagccaguguucuaacaaac

SEQ ID NO: 3002 - RNA, 21 nt, artificial
  siRNA Oligomer
ggguuuuuagacaggaaggua

SEQ ID NO: 3003 - RNA, 21 nt, artificial
  siRNA Oligomer
ugucuauuguuaagcuccaaa

SEQ ID NO: 3004 - RNA, 21 nt, artificial
  siRNA Oligomer
gaauaccugugaggauaggaa

SEQ ID NO: 3005 - RNA, 21 nt, artificial
  siRNA Oligomer
ccugucacuagggaauaauaa

SEQ ID NO: 3006 - RNA, 21 nt, artificial
  siRNA Oligomer
uauucauccugguguuacuga

SEQ ID NO: 3007 - RNA, 21 nt, artificial
  siRNA Oligomer
ggaaucaacuugccagaauuu

SEQ ID NO: 3008 - RNA, 21 nt, artificial
  siRNA Oligomer
uguaaaaagcuggauaggauu

SEQ ID NO: 3009 - RNA, 21 nt, artificial
  siRNA Oligomer
uggauaggauugugugugauu

SEQ ID NO: 3010 - RNA, 21 nt, artificial
  siRNA Oligomer
cuguauacuaccacuuugaau

SEQ ID NO: 3011 - RNA, 21 nt, artificial
  siRNA Oligomer
ggauaggaaauuaguucugag

SEQ ID NO: 3012 - RNA, 21 nt, artificial
  siRNA Oligomer
aaacuaaacuugguugcucaa

SEQ ID NO: 3013 - RNA, 21 nt, artificial
  siRNA Oligomer
cagauuuuuuccaccuuggau

SEQ ID NO: 3014 - RNA, 21 nt, artificial
  siRNA Oligomer
aagguaggauuaaguagguga

SEQ ID NO: 3015 - RNA, 21 nt, artificial
  siRNA Oligomer
agaacugucuguccaaaucaa

SEQ ID NO: 3016 - RNA, 21 nt, artificial
  siRNA Oligomer
cauagaucccauuuuuguaca

SEQ ID NO: 3017 - RNA, 21 nt, artificial
  siRNA Oligomer
gauucuagcgucguaccuacu

SEQ ID NO: 3018 - RNA, 21 nt, artificial
  siRNA Oligomer
ccagagagccugcuaagugau

SEQ ID NO: 3019 - RNA, 21 nt, artificial
  siRNA Oligomer
cacuuaguaaucuauccucuu

SEQ ID NO: 3020 - RNA, 21 nt, artificial
  siRNA Oligomer
acuuccucacucuaauguuuu

SEQ ID NO: 3021 - RNA, 21 nt, artificial
  siRNA Oligomer
ccugagaaacugacccagaga

SEQ ID NO: 3022 - RNA, 21 nt, artificial
  siRNA Oligomer
agguuguguuaugcacgugaa

SEQ ID NO: 3023 - RNA, 21 nt, artificial
  siRNA Oligomer
gccuuuggagaagugauucaa

SEQ ID NO: 3024 - RNA, 21 nt, artificial
  siRNA Oligomer
gagaacugucuguccaaauca

SEQ ID NO: 3025 - RNA, 21 nt, artificial
  siRNA Oligomer
aacucuucaaaugcuuggaaa

SEQ ID NO: 3026 - RNA, 21 nt, artificial
  siRNA Oligomer
caacgagguaauauuugagga

SEQ ID NO: 3027 - RNA, 21 nt, artificial
  siRNA Oligomer
ggaauagguaagcaaaaguag

SEQ ID NO: 3028 - RNA, 21 nt, artificial
  siRNA Oligomer
guguagauuuucugcauagau

SEQ ID NO: 3029 - RNA, 21 nt, artificial
  siRNA Oligomer
cacucaacaauguucaauuca

SEQ ID NO: 3030 - RNA, 21 nt, artificial
  siRNA Oligomer
ucaacaauguucaauucagca

SEQ ID NO: 3031 - RNA, 21 nt, artificial
  siRNA Oligomer
gaauugggccaagauaaauca

SEQ ID NO: 3032 - RNA, 21 nt, artificial
  siRNA Oligomer
cuguuaugcuuacaaaauggu

SEQ ID NO: 3033 - RNA, 21 nt, artificial
  siRNA Oligomer
gucuguccaaaucaaagcaaa

SEQ ID NO: 3034 - RNA, 21 nt, artificial
  siRNA Oligomer
ggaauugaaguaucucuccuu

SEQ ID NO: 3035 - RNA, 21 nt, artificial
  siRNA Oligomer
gaagucugcauuggcuaugga

SEQ ID NO: 3036 - RNA, 21 nt, artificial
  siRNA Oligomer
cucucugauucacuuaguaau

SEQ ID NO: 3037 - RNA, 21 nt, artificial
  siRNA Oligomer
agucccucucugauucacuua

SEQ ID NO: 3038 - RNA, 21 nt, artificial
  siRNA Oligomer
ggguccuaaaaagggaaaaua

SEQ ID NO: 3039 - RNA, 21 nt, artificial
  siRNA Oligomer
caaccucaacgagguaauauu

SEQ ID NO: 3040 - RNA, 21 nt, artificial
  siRNA Oligomer
cuauucagcuagucagcuaaa

SEQ ID NO: 3041 - RNA, 21 nt, artificial
  siRNA Oligomer
gauuggaacaacagugauuga

SEQ ID NO: 3042 - RNA, 21 nt, artificial
  siRNA Oligomer
agaucuagucccucucugauu

SEQ ID NO: 3043 - RNA, 21 nt, artificial
  siRNA Oligomer
uuacgaagucugcauuggcua

SEQ ID NO: 3044 - RNA, 21 nt, artificial
  siRNA Oligomer
gcuuuucugggaauugaagua

SEQ ID NO: 3045 - RNA, 21 nt, artificial
  siRNA Oligomer
gaaggguuuuuagacaggaag

SEQ ID NO: 3046 - RNA, 21 nt, artificial
  siRNA Oligomer
ggcuucuugggcaucgaugua

SEQ ID NO: 3047 - RNA, 21 nt, artificial
  siRNA Oligomer
ugguugcaacuggcaguuuga

SEQ ID NO: 3048 - RNA, 21 nt, artificial
  siRNA Oligomer
accagauuugccuauuuugau

SEQ ID NO: 3049 - RNA, 21 nt, artificial
  siRNA Oligomer
uguuaugcacgugaacuugga

SEQ ID NO: 3050 - RNA, 21 nt, artificial
  siRNA Oligomer
uggugacuuccucacucuaau

SEQ ID NO: 3051 - RNA, 21 nt, artificial
  siRNA Oligomer
caugcacccagauuuuuucca

SEQ ID NO: 3052 - RNA, 21 nt, artificial
  siRNA Oligomer
uggcuuauggaaggcuguuaa

SEQ ID NO: 3053 - RNA, 21 nt, artificial
  siRNA Oligomer
uguuccugaacccaaccucaa

SEQ ID NO: 3054 - RNA, 21 nt, artificial
  siRNA Oligomer
gacaggaagguaggauuaagu

SEQ ID NO: 3055 - RNA, 21 nt, artificial
  siRNA Oligomer
cuuaacccuagguaagaguaa

SEQ ID NO: 3056 - RNA, 21 nt, artificial
  siRNA Oligomer
cuuuacucacugauuggaaca

SEQ ID NO: 3057 - RNA, 21 nt, artificial
  siRNA Oligomer
accaccaguuccugacucaaa

SEQ ID NO: 3058 - RNA, 21 nt, artificial
  siRNA Oligomer
gggccaagauaaaucaauguu

SEQ ID NO: 3059 - RNA, 21 nt, artificial
  siRNA Oligomer
ugaaacgggucaauuuacgaa

SEQ ID NO: 3060 - RNA, 21 nt, artificial
  siRNA Oligomer
caaggcuucuugggcaucgau

SEQ ID NO: 3061 - RNA, 21 nt, artificial
  siRNA Oligomer
caccaccaguuccugacucaa

SEQ ID NO: 3062 - RNA, 21 nt, artificial
  siRNA Oligomer
ugaggaaucaacuugccagaa

SEQ ID NO: 3063 - RNA, 21 nt, artificial
  siRNA Oligomer
aauucagcaaggcuuucauau

SEQ ID NO: 3064 - RNA, 21 nt, artificial
  siRNA Oligomer
cuuuauagaauugggccaaga

SEQ ID NO: 3065 - RNA, 21 nt, artificial
  siRNA Oligomer
ugaccaugguugcaacuggca

SEQ ID NO: 3066 - RNA, 21 nt, artificial
  siRNA Oligomer
ugauuuucuggccuuuggaga

SEQ ID NO: 3067 - RNA, 21 nt, artificial
  siRNA Oligomer
uagggaauaauaaaggccuua

SEQ ID NO: 3068 - RNA, 21 nt, artificial
  siRNA Oligomer
ccucaacgagguaauauuuga

SEQ ID NO: 3069 - RNA, 21 nt, artificial
  siRNA Oligomer
gggaauaauaaaggccuuauu

SEQ ID NO: 3070 - RNA, 21 nt, artificial
  siRNA Oligomer
guaggcuugguaauagacuau

SEQ ID NO: 3071 - RNA, 21 nt, artificial
  siRNA Oligomer
ugucuguccaaaucaaagcaa

SEQ ID NO: 3072 - RNA, 21 nt, artificial
  siRNA Oligomer
cuuguggugccauuucaguaa

SEQ ID NO: 3073 - RNA, 21 nt, artificial
  siRNA Oligomer
cccauuuuuguacagaauuga

SEQ ID NO: 3074 - RNA, 21 nt, artificial
  siRNA Oligomer
gguaguaaaacuauucagcua

SEQ ID NO: 3075 - RNA, 21 nt, artificial
  siRNA Oligomer
uuaugcacgugaacuuggaaa

SEQ ID NO: 3076 - RNA, 21 nt, artificial
  siRNA Oligomer
uuggugacuuccucacucuaa

SEQ ID NO: 3077 - RNA, 21 nt, artificial
  siRNA Oligomer
uugaaugggauggaauaggua

SEQ ID NO: 3078 - RNA, 21 nt, artificial
  siRNA Oligomer
uggaauagguaagcaaaagua

SEQ ID NO: 3079 - RNA, 21 nt, artificial
  siRNA Oligomer
aaugcuuggaaagauacuaca

SEQ ID NO: 3080 - RNA, 21 nt, artificial
  siRNA Oligomer
uugucaaggguaguagcugua

SEQ ID NO: 3081 - RNA, 21 nt, artificial
  siRNA Oligomer
gcuucuccucugguuucagga

SEQ ID NO: 3082 - RNA, 21 nt, artificial
  siRNA Oligomer
ggacuagcuucagggacuuuu

SEQ ID NO: 3083 - RNA, 21 nt, artificial
  siRNA Oligomer
gguuuuuagacaggaagguag

SEQ ID NO: 3084 - RNA, 21 nt, artificial
  siRNA Oligomer
caacuugccagaauuugguua

SEQ ID NO: 3085 - RNA, 21 nt, artificial
  siRNA Oligomer
uucuugggcaucgauguagaa

SEQ ID NO: 3086 - RNA, 21 nt, artificial
  siRNA Oligomer
uaaccacgguguuguuuuaga

SEQ ID NO: 3087 - RNA, 21 nt, artificial
  siRNA Oligomer
ugguuucagguaggcuuggua

SEQ ID NO: 3088 - RNA, 21 nt, artificial
  siRNA Oligomer
cuagcuauuagcuccacuuca

SEQ ID NO: 3089 - RNA, 21 nt, artificial
  siRNA Oligomer
acugauacuauaagugaccua

SEQ ID NO: 3090 - RNA, 21 nt, artificial
  siRNA Oligomer
cuugccagaauuugguuaaaa

SEQ ID NO: 3091 - RNA, 21 nt, artificial
  siRNA Oligomer
cccaccugcccuaaauaagaa

SEQ ID NO: 3092 - RNA, 21 nt, artificial
  siRNA Oligomer
caggaagguaggauuaaguag

SEQ ID NO: 3093 - RNA, 21 nt, artificial
  siRNA Oligomer
cggcuugcgagguuguguuau

SEQ ID NO: 3094 - RNA, 21 nt, artificial
  siRNA Oligomer
aauaccugugaggauaggaaa

SEQ ID NO: 3095 - RNA, 21 nt, artificial
  siRNA Oligomer
gauaggauugugugugauucu

SEQ ID NO: 3096 - RNA, 21 nt, artificial
  siRNA Oligomer
gacucaaauuugaaggguuuu

SEQ ID NO: 3097 - RNA, 21 nt, artificial
  siRNA Oligomer
cuugccuguuaugcuuacaaa

SEQ ID NO: 3098 - RNA, 21 nt, artificial
  siRNA Oligomer
cagcuagucagcuaaagucau

SEQ ID NO: 3099 - RNA, 21 nt, artificial
  siRNA Oligomer
guaccuacuuuugagcuuaca

SEQ ID NO: 3100 - RNA, 21 nt, artificial
  siRNA Oligomer
ucaggagaacucugauccuca

SEQ ID NO: 3101 - RNA, 21 nt, artificial
  siRNA Oligomer
gagguaauauuugaggaauca

SEQ ID NO: 3102 - RNA, 21 nt, artificial
  siRNA Oligomer
cgagguaauauuugaggaauc

SEQ ID NO: 3103 - RNA, 21 nt, artificial
  siRNA Oligomer
caauaauggaacugcuucacu

SEQ ID NO: 3104 - RNA, 21 nt, artificial
  siRNA Oligomer
aaagguccuugucccugagaa

SEQ ID NO: 3105 - RNA, 21 nt, artificial
  siRNA Oligomer
uagcgucguaccuacuuuuga

SEQ ID NO: 3106 - RNA, 21 nt, artificial
  siRNA Oligomer
ccagauuugccuauuuugauu

SEQ ID NO: 3107 - RNA, 21 nt, artificial
  siRNA Oligomer
cagguuuccugcccuagcuau

SEQ ID NO: 3108 - RNA, 21 nt, artificial
  siRNA Oligomer
guuuauaguacagccuagaga

SEQ ID NO: 3109 - RNA, 21 nt, artificial
  siRNA Oligomer
gacagauguauucauccuggu

SEQ ID NO: 3110 - RNA, 21 nt, artificial
  siRNA Oligomer
guguucuaacaaacuaaacuc

SEQ ID NO: 3111 - RNA, 21 nt, artificial
  siRNA Oligomer
ggaagguaggauuaaguaggu

SEQ ID NO: 3112 - RNA, 21 nt, artificial
  siRNA Oligomer
aacgagguaauauuugaggaa

SEQ ID NO: 3113 - RNA, 21 nt, artificial
  siRNA Oligomer
uaguacagccuagagaaugaa

SEQ ID NO: 3114 - RNA, 21 nt, artificial
  siRNA Oligomer
agcucaggauuucgacuuguu

SEQ ID NO: 3115 - RNA, 21 nt, artificial
  siRNA Oligomer
cagguaggcuugguaauagac

SEQ ID NO: 3116 - RNA, 21 nt, artificial
  siRNA Oligomer
aaggguccuaaaaagggaaaa

SEQ ID NO: 3117 - RNA, 21 nt, artificial
  siRNA Oligomer
agaucccauuuuuguacagaa

SEQ ID NO: 3118 - RNA, 21 nt, artificial
  siRNA Oligomer
gcuuaaucucagaugaaccau

SEQ ID NO: 3119 - RNA, 21 nt, artificial
  siRNA Oligomer
ggauaccugucacuagggaau

SEQ ID NO: 3120 - RNA, 21 nt, artificial
  siRNA Oligomer
caccaguuccugacucaaauu

SEQ ID NO: 3121 - RNA, 21 nt, artificial
  siRNA Oligomer
cuuccauugagugaaugauga

SEQ ID NO: 3122 - RNA, 21 nt, artificial
  siRNA Oligomer
cuuugaauuauugaaacgggu

SEQ ID NO: 3123 - RNA, 21 nt, artificial
  siRNA Oligomer
gccugcuaagugauuuugacu

SEQ ID NO: 3124 - RNA, 21 nt, artificial
  siRNA Oligomer
caaauuagccaguguucuaac

SEQ ID NO: 3125 - RNA, 21 nt, artificial
  siRNA Oligomer
cuuugacucucuugccuguua

SEQ ID NO: 3126 - RNA, 21 nt, artificial
  siRNA Oligomer
caggugugauccuguuacuga

SEQ ID NO: 3127 - RNA, 21 nt, artificial
  siRNA Oligomer
aacuuuacucacugauuggaa

SEQ ID NO: 3128 - RNA, 21 nt, artificial
  siRNA Oligomer
uccuugucccugagaaacuga

SEQ ID NO: 3129 - RNA, 21 nt, artificial
  siRNA Oligomer
aaaauggugauggcuuaugga

SEQ ID NO: 3130 - RNA, 21 nt, artificial
  siRNA Oligomer
aaauuagccaguguucuaaca

SEQ ID NO: 3131 - RNA, 21 nt, artificial
  siRNA Oligomer
gaaugggauggaauagguaag

SEQ ID NO: 3132 - RNA, 21 nt, artificial
  siRNA Oligomer
gcuuauggaaggcuguuaaau

SEQ ID NO: 3133 - RNA, 21 nt, artificial
  siRNA Oligomer
aaggguaguagcuguauacua

SEQ ID NO: 3134 - RNA, 21 nt, artificial
  siRNA Oligomer
ugaaacucaccguccagauaa

SEQ ID NO: 3135 - RNA, 21 nt, artificial
  siRNA Oligomer
cuagcuucagggacuuuuucu

SEQ ID NO: 3136 - RNA, 21 nt, artificial
  siRNA Oligomer
uacucacugauuggaacaaca

SEQ ID NO: 3137 - RNA, 21 nt, artificial
  siRNA Oligomer
aagugauuuugacuacuggga

SEQ ID NO: 3138 - RNA, 21 nt, artificial
  siRNA Oligomer
ggcaauaauggaacugcuuca

SEQ ID NO: 3139 - RNA, 21 nt, artificial
  siRNA Oligomer
ggguaguaaaacuauucagcu

SEQ ID NO: 3140 - RNA, 21 nt, artificial
  siRNA Oligomer
cugcauagaucccauuuuugu

SEQ ID NO: 3141 - RNA, 21 nt, artificial
  siRNA Oligomer
guuuuaaagaggcaacaaaag

SEQ ID NO: 3142 - RNA, 21 nt, artificial
  siRNA Oligomer
gaacccaaccucaacgaggua

SEQ ID NO: 3143 - RNA, 21 nt, artificial
  siRNA Oligomer
agcuauuagcuccacuucaca

SEQ ID NO: 3144 - RNA, 21 nt, artificial
  siRNA Oligomer
cuuucuguguuucacauucau

SEQ ID NO: 3145 - RNA, 21 nt, artificial
  siRNA Oligomer
cagaauugcuggacuguggcu

SEQ ID NO: 3146 - RNA, 21 nt, artificial
  siRNA Oligomer
caaacuaaacuugguugcuca

SEQ ID NO: 3147 - RNA, 21 nt, artificial
  siRNA Oligomer
cuucuugggcaucgauguaga

SEQ ID NO: 3148 - RNA, 21 nt, artificial
  siRNA Oligomer
gucaaggguaguagcuguaua

SEQ ID NO: 3149 - RNA, 21 nt, artificial
  siRNA Oligomer
ucagguuuccugcccuagcua

SEQ ID NO: 3150 - RNA, 21 nt, artificial
  siRNA Oligomer
cgauguagaacuguuguccuu

SEQ ID NO: 3151 - RNA, 21 nt, artificial
  siRNA Oligomer
ugggcaucgauguagaacugu

SEQ ID NO: 3152 - RNA, 21 nt, artificial
  siRNA Oligomer
gguaguagcuguauacuacca

SEQ ID NO: 3153 - RNA, 21 nt, artificial
  siRNA Oligomer
cucuuuucuuucuguguuuca

SEQ ID NO: 3154 - RNA, 21 nt, artificial
  siRNA Oligomer
cuggagaacugucuguccaaa

SEQ ID NO: 3155 - RNA, 21 nt, artificial
  siRNA Oligomer
uugucaccacugacugggcaa

SEQ ID NO: 3156 - RNA, 21 nt, artificial
  siRNA Oligomer
ccaaaucaaagcaaacuaaac

SEQ ID NO: 3157 - RNA, 21 nt, artificial
  siRNA Oligomer
gcuuggaaagauacuacaaag

SEQ ID NO: 3158 - RNA, 21 nt, artificial
  siRNA Oligomer
ggcaguguuaucucaucucug

SEQ ID NO: 3159 - RNA, 21 nt, artificial
  siRNA Oligomer
acagaauugaaugggauggaa

SEQ ID NO: 3160 - RNA, 21 nt, artificial
  siRNA Oligomer
cacugauuggaacaacaguga

SEQ ID NO: 3161 - RNA, 21 nt, artificial
  siRNA Oligomer
gcuuaacccuagguaagagua

SEQ ID NO: 3162 - RNA, 21 nt, artificial
  siRNA Oligomer
ucuugccuguuaugcuuacaa

SEQ ID NO: 3163 - RNA, 21 nt, artificial
  siRNA Oligomer
cacuaacaguuaucuuugacu

SEQ ID NO: 3164 - RNA, 21 nt, artificial
  siRNA Oligomer
gagagccugcuaagugauuuu

SEQ ID NO: 3165 - RNA, 21 nt, artificial
  siRNA Oligomer
acaccaccaguuccugacuca

SEQ ID NO: 3166 - RNA, 21 nt, artificial
  siRNA Oligomer
gauuauuucaugauuggguag

SEQ ID NO: 3167 - RNA, 21 nt, artificial
  siRNA Oligomer
augcuuggaaagauacuacaa

SEQ ID NO: 3168 - RNA, 21 nt, artificial
  siRNA Oligomer
ugcauagaucccauuuuugua

SEQ ID NO: 3169 - RNA, 21 nt, artificial
  siRNA Oligomer
uaggcuugguaauagacuaua

SEQ ID NO: 3170 - RNA, 21 nt, artificial
  siRNA Oligomer
ugauuuugacuacugggauua

SEQ ID NO: 3171 - RNA, 21 nt, artificial
  siRNA Oligomer
ugguuuauaguacagccuaga

SEQ ID NO: 3172 - RNA, 21 nt, artificial
  siRNA Oligomer
cugcauuggcuauggagauau

SEQ ID NO: 3173 - RNA, 21 nt, artificial
  siRNA Oligomer
uuauagaauugggccaagaua

SEQ ID NO: 3174 - RNA, 21 nt, artificial
  siRNA Oligomer
gauacuacaaagccaaucuuu

SEQ ID NO: 3175 - RNA, 21 nt, artificial
  siRNA Oligomer
cagcaaggcuuucauauccuu

SEQ ID NO: 3176 - RNA, 21 nt, artificial
  siRNA Oligomer
gaauugcuggacuguggcuau

SEQ ID NO: 3177 - RNA, 21 nt, artificial
  siRNA Oligomer
caggauuucgacuuguuaaga

SEQ ID NO: 3178 - RNA, 21 nt, artificial
  siRNA Oligomer
gguccuugucccugagaaacu

SEQ ID NO: 3179 - RNA, 21 nt, artificial
  siRNA Oligomer
ugguguuacugaaaaacaggu

SEQ ID NO: 3180 - RNA, 21 nt, artificial
  siRNA Oligomer
agugaaugaugaauaccugug

SEQ ID NO: 3181 - RNA, 21 nt, artificial
  siRNA Oligomer
caguuaucuuugacucucuug

SEQ ID NO: 3182 - RNA, 21 nt, artificial
  siRNA Oligomer
acggcaauaauggaacugcuu

SEQ ID NO: 3183 - RNA, 21 nt, artificial
  siRNA Oligomer
auuugaggaaucaacuugcca

SEQ ID NO: 3184 - RNA, 21 nt, artificial
  siRNA Oligomer
ccaaccucaacgagguaauau

SEQ ID NO: 3185 - RNA, 21 nt, artificial
  siRNA Oligomer
cccuguucuuaaguguugaau

SEQ ID NO: 3186 - RNA, 21 nt, artificial
  siRNA Oligomer
gaaccauuucaccauggcagu

SEQ ID NO: 3187 - RNA, 21 nt, artificial
  siRNA Oligomer
cagccuagagaaugaaacuca

SEQ ID NO: 3188 - RNA, 21 nt, artificial
  siRNA Oligomer
agccuaucaaaacuuccaaaa

SEQ ID NO: 3189 - RNA, 21 nt, artificial
  siRNA Oligomer
cuugcgagguuguguuaugca

SEQ ID NO: 3190 - RNA, 21 nt, artificial
  siRNA Oligomer
uagaagcccauuugaguuuua

SEQ ID NO: 3191 - RNA, 21 nt, artificial
  siRNA Oligomer
accugucacuagggaauaaua

SEQ ID NO: 3192 - RNA, 21 nt, artificial
  siRNA Oligomer
agucagcuaaagucauuugua

SEQ ID NO: 3193 - RNA, 21 nt, artificial
  siRNA Oligomer
caguauuacaugugcuuaauc

SEQ ID NO: 3194 - RNA, 21 nt, artificial
  siRNA Oligomer
cacccagauuuuuuccaccuu

SEQ ID NO: 3195 - RNA, 21 nt, artificial
  siRNA Oligomer
cuuacaaaauggugauggcuu

SEQ ID NO: 3196 - RNA, 21 nt, artificial
  siRNA Oligomer
uuugguuaaaaugcuggagaa

SEQ ID NO: 3197 - RNA, 21 nt, artificial
  siRNA Oligomer
gauuacucuuccauugaguga

SEQ ID NO: 3198 - RNA, 21 nt, artificial
  siRNA Oligomer
caugucuauuguuaagcucca

SEQ ID NO: 3199 - RNA, 21 nt, artificial
  siRNA Oligomer
gcguagggacagauguauuca

SEQ ID NO: 3200 - RNA, 21 nt, artificial
  siRNA Oligomer
agccguugaccaugguugcaa

SEQ ID NO: 3201 - RNA, 21 nt, artificial
  siRNA Oligomer
uuacaugugcuuaaucucaga

SEQ ID NO: 3202 - RNA, 21 nt, artificial
  siRNA Oligomer
aucucugggcuuuucugggaa

SEQ ID NO: 3203 - RNA, 21 nt, artificial
  siRNA Oligomer
ccuugucccugagaaacugac

SEQ ID NO: 3204 - RNA, 21 nt, artificial
  siRNA Oligomer
uagaauugggccaagauaaau

SEQ ID NO: 3205 - RNA, 21 nt, artificial
  siRNA Oligomer
agggacuuuuucuuuaguaga

SEQ ID NO: 3206 - RNA, 21 nt, artificial
  siRNA Oligomer
uugagugaaugaugaauaccu

SEQ ID NO: 3207 - RNA, 21 nt, artificial
  siRNA Oligomer
gcaucgauguagaacuguugu

SEQ ID NO: 3208 - RNA, 21 nt, artificial
  siRNA Oligomer
uugaaacgggucaauuuacga

SEQ ID NO: 3209 - RNA, 21 nt, artificial
  siRNA Oligomer
aagucugcauuggcuauggag

SEQ ID NO: 3210 - RNA, 21 nt, artificial
  siRNA Oligomer
augucuauuguuaagcuccaa

SEQ ID NO: 3211 - RNA, 21 nt, artificial
  siRNA Oligomer
auugggccaagauaaaucaau

SEQ ID NO: 3212 - RNA, 21 nt, artificial
  siRNA Oligomer
ugcuuaaucucagaugaacca

SEQ ID NO: 3213 - RNA, 21 nt, artificial
  siRNA Oligomer
cagcuaaagucauuuguaguu

SEQ ID NO: 3214 - RNA, 21 nt, artificial
  siRNA Oligomer
gagaauugcucaagauguccu

SEQ ID NO: 3215 - RNA, 21 nt, artificial
  siRNA Oligomer
ggcuauggagauaugguuuau

SEQ ID NO: 3216 - RNA, 21 nt, artificial
  siRNA Oligomer
gcccuagcuauuagcuccacu

SEQ ID NO: 3217 - RNA, 21 nt, artificial
  siRNA Oligomer
cagcauuucagaauugcugga

SEQ ID NO: 3218 - RNA, 21 nt, artificial
  siRNA Oligomer
ccuacuuuugagcuuacacuu

SEQ ID NO: 3219 - RNA, 21 nt, artificial
  siRNA Oligomer
ccagagaauugcucaagaugu

SEQ ID NO: 3220 - RNA, 21 nt, artificial
  siRNA Oligomer
agguaggcuugguaauagacu

SEQ ID NO: 3221 - RNA, 21 nt, artificial
  siRNA Oligomer
gauuuugacuacugggauuau

SEQ ID NO: 3222 - RNA, 21 nt, artificial
  siRNA Oligomer
augaugaauaccugugaggau

SEQ ID NO: 3223 - RNA, 21 nt, artificial
  siRNA Oligomer
gcuccaaagguucacuguguu

SEQ ID NO: 3224 - RNA, 21 nt, artificial
  siRNA Oligomer
ugauccuguuacugauacuau

SEQ ID NO: 3225 - RNA, 21 nt, artificial
  siRNA Oligomer
gucaauuuacgaagucugcau

SEQ ID NO: 3226 - RNA, 21 nt, artificial
  siRNA Oligomer
ggaaacagagccguugaccau

SEQ ID NO: 3227 - RNA, 21 nt, artificial
  siRNA Oligomer
gaaaaacaggugugauccugu

SEQ ID NO: 3228 - RNA, 21 nt, artificial
  siRNA Oligomer
ucagggacuuuuucuuuagua

SEQ ID NO: 3229 - RNA, 21 nt, artificial
  siRNA Oligomer
ucaugauuggguaguaaaacu

SEQ ID NO: 3230 - RNA, 21 nt, artificial
  siRNA Oligomer
cauggacuagcuucagggacu

SEQ ID NO: 3231 - RNA, 21 nt, artificial
  siRNA Oligomer
gcgagguuguguuaugcacgu

SEQ ID NO: 3232 - RNA, 21 nt, artificial
  siRNA Oligomer
aacccaaccucaacgagguaa

SEQ ID NO: 3233 - RNA, 21 nt, artificial
  siRNA Oligomer
gagauaugguuuauaguacag

SEQ ID NO: 3234 - RNA, 21 nt, artificial
  siRNA Oligomer
aggugugauccuguuacugau

SEQ ID NO: 3235 - RNA, 21 nt, artificial
  siRNA Oligomer
gagaaacugacccagagaauu

SEQ ID NO: 3236 - RNA, 21 nt, artificial
  siRNA Oligomer
agauuuucugcauagauccca

SEQ ID NO: 3237 - RNA, 21 nt, artificial
  siRNA Oligomer
aggaaucaacuugccagaauu

SEQ ID NO: 3238 - RNA, 21 nt, artificial
  siRNA Oligomer
ccaugcaugcacccagauuuu

SEQ ID NO: 3239 - RNA, 21 nt, artificial
  siRNA Oligomer
acuguuguccuuuuuccacua

SEQ ID NO: 3240 - RNA, 21 nt, artificial
  siRNA Oligomer
uaacccuagguaagaguaaau

SEQ ID NO: 3241 - RNA, 21 nt, artificial
  siRNA Oligomer
auucauccugguguuacugaa

SEQ ID NO: 3242 - RNA, 21 nt, artificial
  siRNA Oligomer
agggaauaauaaaggccuuau

SEQ ID NO: 3243 - RNA, 21 nt, artificial
  siRNA Oligomer
uuguuaagcuccaaagguuca

SEQ ID NO: 3244 - RNA, 21 nt, artificial
  siRNA Oligomer
cugguuucaggagaacucuga

SEQ ID NO: 3245 - RNA, 21 nt, artificial
  siRNA Oligomer
uggaaagauacuacaaagcca

SEQ ID NO: 3246 - RNA, 21 nt, artificial
  siRNA Oligomer
cucugauccucagcucaggau

SEQ ID NO: 3247 - RNA, 21 nt, artificial
  siRNA Oligomer
caacuggcaguuugagcagca

SEQ ID NO: 3248 - RNA, 21 nt, artificial
  siRNA Oligomer
uaagcaaaaguagaagcccau

SEQ ID NO: 3249 - RNA, 21 nt, artificial
  siRNA Oligomer
gauuuucugcauagaucccau

SEQ ID NO: 3250 - RNA, 21 nt, artificial
  siRNA Oligomer
gaguuuuacauuugauuccac

SEQ ID NO: 3251 - RNA, 21 nt, artificial
  siRNA Oligomer
cugcccuagcuauuagcucca

SEQ ID NO: 3252 - RNA, 21 nt, artificial
  siRNA Oligomer
uccacuaacaguuaucuuuga

SEQ ID NO: 3253 - RNA, 21 nt, artificial
  siRNA Oligomer
aggcuugguaauagacuauau

SEQ ID NO: 3254 - RNA, 21 nt, artificial
  siRNA Oligomer
aaagcuuguggugccauuuca

SEQ ID NO: 3255 - RNA, 21 nt, artificial
  siRNA Oligomer
uagccuaucaaaacuuccaaa

SEQ ID NO: 3256 - RNA, 21 nt, artificial
  siRNA Oligomer
gucuuauuccaacuaaguaga

SEQ ID NO: 3257 - RNA, 21 nt, artificial
  siRNA Oligomer
ucagcuaaagucauuuguagu

SEQ ID NO: 3258 - RNA, 21 nt, artificial
  siRNA Oligomer
caacugcagcuaacaggcuga

SEQ ID NO: 3259 - RNA, 21 nt, artificial
  siRNA Oligomer
cgucguaccuacuuuugagcu

SEQ ID NO: 3260 - RNA, 21 nt, artificial
  siRNA Oligomer
caacagugauugaaggguccu

SEQ ID NO: 3261 - RNA, 21 nt, artificial
  siRNA Oligomer
ggaacugcuucacuguuucuu

SEQ ID NO: 3262 - RNA, 21 nt, artificial
  siRNA Oligomer
cccagauuuuuuccaccuugg

SEQ ID NO: 3263 - RNA, 21 nt, artificial
  siRNA Oligomer
cuuaaucucagaugaaccauu

SEQ ID NO: 3264 - RNA, 21 nt, artificial
  siRNA Oligomer
aaaacaggugugauccuguua

SEQ ID NO: 3265 - RNA, 21 nt, artificial
  siRNA Oligomer
ugagaucuagucccucucuga

SEQ ID NO: 3266 - RNA, 21 nt, artificial
  siRNA Oligomer
caaagcaaacuaaacuugguu

SEQ ID NO: 3267 - RNA, 21 nt, artificial
  siRNA Oligomer
uggcaguuugagcagcaagaa

SEQ ID NO: 3268 - RNA, 21 nt, artificial
  siRNA Oligomer
uguuucuuggugacuuccuca

SEQ ID NO: 3269 - RNA, 21 nt, artificial
  siRNA Oligomer
uucaaauuagccaguguucua

SEQ ID NO: 3270 - RNA, 21 nt, artificial
  siRNA Oligomer
acugcuucacuguuucuuggu

SEQ ID NO: 3271 - RNA, 21 nt, artificial
  siRNA Oligomer
gacccagagaauugcucaaga

SEQ ID NO: 3272 - RNA, 21 nt, artificial
  siRNA Oligomer
gaauugaaguaucucuccuua

SEQ ID NO: 3273 - RNA, 21 nt, artificial
  siRNA Oligomer
aucuagucccucucugauuca

SEQ ID NO: 3274 - RNA, 21 nt, artificial
  siRNA Oligomer
ucaaaugcuuggaaagauacu

SEQ ID NO: 3275 - RNA, 21 nt, artificial
  siRNA Oligomer
caauugucaaggguaguagcu

SEQ ID NO: 3276 - RNA, 21 nt, artificial
  siRNA Oligomer
cugacucaaauuugaaggguu

SEQ ID NO: 3277 - RNA, 21 nt, artificial
  siRNA Oligomer
uuacaaaauggugauggcuua

SEQ ID NO: 3278 - RNA, 21 nt, artificial
  siRNA Oligomer
ucucugggcuuuucugggaau

SEQ ID NO: 3279 - RNA, 21 nt, artificial
  siRNA Oligomer
caaaagcccacaccaccaguu

SEQ ID NO: 3280 - RNA, 21 nt, artificial
  siRNA Oligomer
uaggauugugugugauucuag

SEQ ID NO: 3281 - RNA, 21 nt, artificial
  siRNA Oligomer
caaaugcuuggaaagauacua

SEQ ID NO: 3282 - RNA, 21 nt, artificial
  siRNA Oligomer
ccuguuacugauacuauaagu

SEQ ID NO: 3283 - RNA, 21 nt, artificial
  siRNA Oligomer
gcacccagauuuuuuccaccu

SEQ ID NO: 3284 - RNA, 21 nt, artificial
  siRNA Oligomer
cucuaauguuuuaaagaggca

SEQ ID NO: 3285 - RNA, 21 nt, artificial
  siRNA Oligomer
caguuccugacucaaauuuga

SEQ ID NO: 3286 - RNA, 21 nt, artificial
  siRNA Oligomer
gucucuuuucuuucuguguuu

SEQ ID NO: 3287 - RNA, 21 nt, artificial
  siRNA Oligomer
uaguguagauuuucugcauag

SEQ ID NO: 3288 - RNA, 21 nt, artificial
  siRNA Oligomer
gguaggauuaaguaggugagu

SEQ ID NO: 3289 - RNA, 21 nt, artificial
  siRNA Oligomer
gugauucuagcgucguaccua

SEQ ID NO: 3290 - RNA, 21 nt, artificial
  siRNA Oligomer
gguuaaaaugcuggagaacug

SEQ ID NO: 3291 - RNA, 21 nt, artificial
  siRNA Oligomer
cucagaugaaccauuucacca

SEQ ID NO: 3292 - RNA, 21 nt, artificial
  siRNA Oligomer
ugagaaacugacccagagaau

SEQ ID NO: 3293 - RNA, 21 nt, artificial
  siRNA Oligomer
acuugguugcucaaagguccu

SEQ ID NO: 3294 - RNA, 21 nt, artificial
  siRNA Oligomer
uaggauuaaguaggugaguuu

SEQ ID NO: 3295 - RNA, 21 nt, artificial
  siRNA Oligomer
aggauuaaguaggugaguuua

SEQ ID NO: 3296 - RNA, 21 nt, artificial
  siRNA Oligomer
uccuuuuuccacuaacaguua

SEQ ID NO: 3297 - RNA, 21 nt, artificial
  siRNA Oligomer
gaagccaccugccuguguuua

SEQ ID NO: 3298 - RNA, 21 nt, artificial
  siRNA Oligomer
gcuucuugggcaucgauguag

SEQ ID NO: 3299 - RNA, 21 nt, artificial
  siRNA Oligomer
cugucuguccaaaucaaagca

SEQ ID NO: 3300 - RNA, 21 nt, artificial
  siRNA Oligomer
cuggauaggauugugugugau

SEQ ID NO: 3301 - RNA, 21 nt, artificial
  siRNA Oligomer
cugggcuuuucugggaauuga

SEQ ID NO: 3302 - RNA, 21 nt, artificial
  siRNA Oligomer
cuaacaguuaucuuugacucu

SEQ ID NO: 3303 - RNA, 21 nt, artificial
  siRNA Oligomer
auguaaaaagcuggauaggau

SEQ ID NO: 3304 - RNA, 21 nt, artificial
  siRNA Oligomer
ucuccucugguuucaggagaa

SEQ ID NO: 3305 - RNA, 21 nt, artificial
  siRNA Oligomer
gauuuuuuccaccuuggauac

SEQ ID NO: 3306 - RNA, 21 nt, artificial
  siRNA Oligomer
aacucaccguccagauaacca

SEQ ID NO: 3307 - RNA, 21 nt, artificial
  siRNA Oligomer
agugauuuugacuacugggau

SEQ ID NO: 3308 - RNA, 21 nt, artificial
  siRNA Oligomer
auggaauagguaagcaaaagu

SEQ ID NO: 3309 - RNA, 21 nt, artificial
  siRNA Oligomer
gauggaauagguaagcaaaag

SEQ ID NO: 3310 - RNA, 21 nt, artificial
  siRNA Oligomer
gguuuauaguacagccuagag

SEQ ID NO: 3311 - RNA, 21 nt, artificial
  siRNA Oligomer
gauugugugugauucuagcgu

SEQ ID NO: 3312 - RNA, 21 nt, artificial
  siRNA Oligomer
cggcaauaauggaacugcuuc

SEQ ID NO: 3313 - RNA, 21 nt, artificial
  siRNA Oligomer
cuccaaagguucacuguguuu

SEQ ID NO: 3314 - RNA, 21 nt, artificial
  siRNA Oligomer
agaagccaccugccuguguuu

SEQ ID NO: 3315 - RNA, 21 nt, artificial
  siRNA Oligomer
ugucaaggguaguagcuguau

SEQ ID NO: 3316 - RNA, 21 nt, artificial
  siRNA Oligomer
cauugagugaaugaugaauac

SEQ ID NO: 3317 - RNA, 21 nt, artificial
  siRNA Oligomer
agguuuccugcccuagcuauu

SEQ ID NO: 3318 - RNA, 21 nt, artificial
  siRNA Oligomer
uccugaacccaaccucaacga

SEQ ID NO: 3319 - RNA, 21 nt, artificial
  siRNA Oligomer
aguagaagcccauuugaguuu

SEQ ID NO: 3320 - RNA, 21 nt, artificial
  siRNA Oligomer
gccuccacucaacaauguuca

SEQ ID NO: 3321 - RNA, 21 nt, artificial
  siRNA Oligomer
guuaaaaugcuggagaacugu

SEQ ID NO: 3322 - RNA, 21 nt, artificial
  siRNA Oligomer
auaccugugaggauaggaaau

SEQ ID NO: 3323 - RNA, 21 nt, artificial
  siRNA Oligomer
uguacagaauugaaugggaug

SEQ ID NO: 3324 - RNA, 21 nt, artificial
  siRNA Oligomer
caguguuaucucaucucuggg

SEQ ID NO: 3325 - RNA, 21 nt, artificial
  siRNA Oligomer
uggacuagcuucagggacuuu

SEQ ID NO: 3326 - RNA, 21 nt, artificial
  siRNA Oligomer
ugugaggauaggaaauuaguu

SEQ ID NO: 3327 - RNA, 21 nt, artificial
  siRNA Oligomer
gaggcaacaaaagcuuguggu

SEQ ID NO: 3328 - RNA, 21 nt, artificial
  siRNA Oligomer
ucuggccuuuggagaagugau

SEQ ID NO: 3329 - RNA, 21 nt, artificial
  siRNA Oligomer
caucucugggcuuuucuggga

SEQ ID NO: 3330 - RNA, 21 nt, artificial
  siRNA Oligomer
gagaaugaaacucaccgucca

SEQ ID NO: 3331 - RNA, 21 nt, artificial
  siRNA Oligomer
uuuauaguacagccuagagaa

SEQ ID NO: 3332 - RNA, 21 nt, artificial
  siRNA Oligomer
agaacuguuguccuuuuucca

SEQ ID NO: 3333 - RNA, 21 nt, artificial
  siRNA Oligomer
aacuaaacuugguugcucaaa

SEQ ID NO: 3334 - RNA, 21 nt, artificial
  siRNA Oligomer
gugacuuccucacucuaaugu

SEQ ID NO: 3335 - RNA, 21 nt, artificial
  siRNA Oligomer
acaaaagcuuguggugccauu

SEQ ID NO: 3336 - RNA, 21 nt, artificial
  siRNA Oligomer
cugacccagagaauugcucaa

SEQ ID NO: 3337 - RNA, 21 nt, artificial
  siRNA Oligomer
ucaggauuucgacuuguuaag

SEQ ID NO: 3338 - RNA, 21 nt, artificial
  siRNA Oligomer
acucuuccauugagugaauga

SEQ ID NO: 3339 - RNA, 21 nt, artificial
  siRNA Oligomer
gcuaaagucauuuguaguuug

SEQ ID NO: 3340 - RNA, 21 nt, artificial
  siRNA Oligomer
cauuggcuauggagauauggu

SEQ ID NO: 3341 - RNA, 21 nt, artificial
  siRNA Oligomer
gaacugcucauggacuagcuu

SEQ ID NO: 3342 - RNA, 21 nt, artificial
  siRNA Oligomer
cuugguugcucaaagguccuu

SEQ ID NO: 3343 - RNA, 21 nt, artificial
  siRNA Oligomer
gauaccugucacuagggaaua

SEQ ID NO: 3344 - RNA, 21 nt, artificial
  siRNA Oligomer
aagguccuugucccugagaaa

SEQ ID NO: 3345 - RNA, 21 nt, artificial
  siRNA Oligomer
ggcaguuugagcagcaagaac

SEQ ID NO: 3346 - RNA, 21 nt, artificial
  siRNA Oligomer
cuggccuuuggagaagugauu

SEQ ID NO: 3347 - RNA, 21 nt, artificial
  siRNA Oligomer
auuggaacaacagugauugaa

SEQ ID NO: 3348 - RNA, 21 nt, artificial
  siRNA Oligomer
gauguauucauccugguguua

SEQ ID NO: 3349 - RNA, 21 nt, artificial
  siRNA Oligomer
ccguugaccaugguugcaacu

SEQ ID NO: 3350 - RNA, 21 nt, artificial
  siRNA Oligomer
cuauauaaaccagauuugccu

SEQ ID NO: 3351 - RNA, 21 nt, artificial
  siRNA Oligomer
gauguagaacuguuguccuuu

SEQ ID NO: 3352 - RNA, 21 nt, artificial
  siRNA Oligomer
uuaguuuguuagaacacuggc

SEQ ID NO: 3353 - RNA, 21 nt, artificial
  siRNA Oligomer
uuuugcuuaccuauuccaucc

SEQ ID NO: 3354 - RNA, 21 nt, artificial
  siRNA Oligomer
uuaaacucaccuacuuaaucc

SEQ ID NO: 3355 - RNA, 21 nt, artificial
  siRNA Oligomer
uuucuuauuuagggcaggugg

SEQ ID NO: 3356 - RNA, 21 nt, artificial
  siRNA Oligomer
guuuaguuuguuagaacacug

SEQ ID NO: 3357 - RNA, 21 nt, artificial
  siRNA Oligomer
uuuaggacccuucaaucacug

SEQ ID NO: 3358 - RNA, 21 nt, artificial
  siRNA Oligomer
uuggacagacaguucuccagc

SEQ ID NO: 3359 - RNA, 21 nt, artificial
  siRNA Oligomer
acagguauucaucauucacuc

SEQ ID NO: 3360 - RNA, 21 nt, artificial
  siRNA Oligomer
uuucuuaacaagucgaaaucc

SEQ ID NO: 3361 - RNA, 21 nt, artificial
  siRNA Oligomer
uagaucucagaacuaauuucc

SEQ ID NO: 3362 - RNA, 21 nt, artificial
  siRNA Oligomer
uuucaauuuccaaguucacgu

SEQ ID NO: 3363 - RNA, 21 nt, artificial
  siRNA Oligomer
aguuuguuagaacacuggcua

SEQ ID NO: 3364 - RNA, 21 nt, artificial
  siRNA Oligomer
uuuuucaguaacaccaggaug

SEQ ID NO: 3365 - RNA, 21 nt, artificial
  siRNA Oligomer
uaguuuguuagaacacuggcu

SEQ ID NO: 3366 - RNA, 21 nt, artificial
  siRNA Oligomer
uuuucaauuuccaaguucacg

SEQ ID NO: 3367 - RNA, 21 nt, artificial
  siRNA Oligomer
uucaauucccagaaaagccca

SEQ ID NO: 3368 - RNA, 21 nt, artificial
  siRNA Oligomer
uuggcuuuguaguaucuuucc

SEQ ID NO: 3369 - RNA, 21 nt, artificial
  siRNA Oligomer
uucaauuuccaaguucacgug

SEQ ID NO: 3370 - RNA, 21 nt, artificial
  siRNA Oligomer
ucaauuuccaaguucacgugc

SEQ ID NO: 3371 - RNA, 21 nt, artificial
  siRNA Oligomer
uuuaacagccuuccauaagcc

SEQ ID NO: 3372 - RNA, 21 nt, artificial
  siRNA Oligomer
uguacuauaaaccauaucucc

SEQ ID NO: 3373 - RNA, 21 nt, artificial
  siRNA Oligomer
uuugcuuaccuauuccauccc

SEQ ID NO: 3374 - RNA, 21 nt, artificial
  siRNA Oligomer
uagacaugcaaaacaacauug

SEQ ID NO: 3375 - RNA, 21 nt, artificial
  siRNA Oligomer
uuucauucucuaggcuguacu

SEQ ID NO: 3376 - RNA, 21 nt, artificial
  siRNA Oligomer
uuuugaaucacuucuccaaag

SEQ ID NO: 3377 - RNA, 21 nt, artificial
  siRNA Oligomer
uuugaaucacuucuccaaagg

SEQ ID NO: 3378 - RNA, 21 nt, artificial
  siRNA Oligomer
auuccaucccauucaauucug

SEQ ID NO: 3379 - RNA, 21 nt, artificial
  siRNA Oligomer
uugcuuaccuauuccauccca

SEQ ID NO: 3380 - RNA, 21 nt, artificial
  siRNA Oligomer
uccaagguggaaaaaaucugg

SEQ ID NO: 3381 - RNA, 21 nt, artificial
  siRNA Oligomer
uuucccuuuuuaggacccuuc

SEQ ID NO: 3382 - RNA, 21 nt, artificial
  siRNA Oligomer
uaaaacauuagagugaggaag

SEQ ID NO: 3383 - RNA, 21 nt, artificial
  siRNA Oligomer
uuugauuuggacagacaguuc

SEQ ID NO: 3384 - RNA, 21 nt, artificial
  siRNA Oligomer
uugcugaauugaacauuguug

SEQ ID NO: 3385 - RNA, 21 nt, artificial
  siRNA Oligomer
uucucauuuacucuuaccuag

SEQ ID NO: 3386 - RNA, 21 nt, artificial
  siRNA Oligomer
uuuuaggacccuucaaucacu

SEQ ID NO: 3387 - RNA, 21 nt, artificial
  siRNA Oligomer
uuuuuaggacccuucaaucac

SEQ ID NO: 3388 - RNA, 21 nt, artificial
  siRNA Oligomer
ccucacagguauucaucauuc

SEQ ID NO: 3389 - RNA, 21 nt, artificial
  siRNA Oligomer
uuacuaagugaaucagagagg

SEQ ID NO: 3390 - RNA, 21 nt, artificial
  siRNA Oligomer
uauccaagguggaaaaaaucu

SEQ ID NO: 3391 - RNA, 21 nt, artificial
  siRNA Oligomer
uguugaguggaggcuaaauuc

SEQ ID NO: 3392 - RNA, 21 nt, artificial
  siRNA Oligomer
ucuacuuuugcuuaccuauuc

SEQ ID NO: 3393 - RNA, 21 nt, artificial
  siRNA Oligomer
auaagcuccuuauccacgacc

SEQ ID NO: 3394 - RNA, 21 nt, artificial
  siRNA Oligomer
uauauagucuauuaccaagcc

SEQ ID NO: 3395 - RNA, 21 nt, artificial
  siRNA Oligomer
uuuauuauucccuagugacag

SEQ ID NO: 3396 - RNA, 21 nt, artificial
  siRNA Oligomer
uagagugaggaagucaccaag

SEQ ID NO: 3397 - RNA, 21 nt, artificial
  siRNA Oligomer
ucucauuuacucuuaccuagg

SEQ ID NO: 3398 - RNA, 21 nt, artificial
  siRNA Oligomer
uacugaaauggcaccacaagc

SEQ ID NO: 3399 - RNA, 21 nt, artificial
  siRNA Oligomer
cuauccucacagguauucauc

SEQ ID NO: 3400 - RNA, 21 nt, artificial
  siRNA Oligomer
uaucaguaacaggaucacacc

SEQ ID NO: 3401 - RNA, 21 nt, artificial
  siRNA Oligomer
uaagcuccuuauccacgaccc

SEQ ID NO: 3402 - RNA, 21 nt, artificial
  siRNA Oligomer
uugaacagugacauuuuaggu

SEQ ID NO: 3403 - RNA, 21 nt, artificial
  siRNA Oligomer
uauaguaucaguaacaggauc

SEQ ID NO: 3404 - RNA, 21 nt, artificial
  siRNA Oligomer
ucucagggacaaggaccuuug

SEQ ID NO: 3405 - RNA, 21 nt, artificial
  siRNA Oligomer
uuccauaagccaucaccauuu

SEQ ID NO: 3406 - RNA, 21 nt, artificial
  siRNA Oligomer
augaauacaucugucccuacg

SEQ ID NO: 3407 - RNA, 21 nt, artificial
  siRNA Oligomer
uuuaucuuggcccaauucuau

SEQ ID NO: 3408 - RNA, 21 nt, artificial
  siRNA Oligomer
auuggcuuuguaguaucuuuc

SEQ ID NO: 3409 - RNA, 21 nt, artificial
  siRNA Oligomer
uaaagaaaaagucccugaagc

SEQ ID NO: 3410 - RNA, 21 nt, artificial
  siRNA Oligomer
uaguuuuacuacccaaucaug

SEQ ID NO: 3411 - RNA, 21 nt, artificial
  siRNA Oligomer
uuguuagaacacuggcuaauu

SEQ ID NO: 3412 - RNA, 21 nt, artificial
  siRNA Oligomer
ucuauuaccaagccuaccuga

SEQ ID NO: 3413 - RNA, 21 nt, artificial
  siRNA Oligomer
uuaccuauuccaucccauuca

SEQ ID NO: 3414 - RNA, 21 nt, artificial
  siRNA Oligomer
aaggcaucuaaaacaacaccg

SEQ ID NO: 3415 - RNA, 21 nt, artificial
  siRNA Oligomer
uuaccaagccuaccugaaacc

SEQ ID NO: 3416 - RNA, 21 nt, artificial
  siRNA Oligomer
uccaaaggccagaaaaucagc

SEQ ID NO: 3417 - RNA, 21 nt, artificial
  siRNA Oligomer
uugaacauuguugaguggagg

SEQ ID NO: 3418 - RNA, 21 nt, artificial
  siRNA Oligomer
uucaaagugguaguauacagc

SEQ ID NO: 3419 - RNA, 21 nt, artificial
  siRNA Oligomer
ucaacggcucuguuuccuucg

SEQ ID NO: 3420 - RNA, 21 nt, artificial
  siRNA Oligomer
uuaaacacaaguguaagcuca

SEQ ID NO: 3421 - RNA, 21 nt, artificial
  siRNA Oligomer
aauacaucugucccuacgccg

SEQ ID NO: 3422 - RNA, 21 nt, artificial
  siRNA Oligomer
uauuccaucccauucaauucu

SEQ ID NO: 3423 - RNA, 21 nt, artificial
  siRNA Oligomer
aaucacuuagcaggcucucug

SEQ ID NO: 3424 - RNA, 21 nt, artificial
  siRNA Oligomer
uuaucuuggcccaauucuaua

SEQ ID NO: 3425 - RNA, 21 nt, artificial
  siRNA Oligomer
uuaacaagucgaaauccugag

SEQ ID NO: 3426 - RNA, 21 nt, artificial
  siRNA Oligomer
uaucuuuccaagcauuugaag

SEQ ID NO: 3427 - RNA, 21 nt, artificial
  siRNA Oligomer
auauuuucccuuuuuaggacc

SEQ ID NO: 3428 - RNA, 21 nt, artificial
  siRNA Oligomer
auuuggacagacaguucucca

SEQ ID NO: 3429 - RNA, 21 nt, artificial
  siRNA Oligomer
uaacaagucgaaauccugagc

SEQ ID NO: 3430 - RNA, 21 nt, artificial
  siRNA Oligomer
ucaaaaucacuuagcaggcuc

SEQ ID NO: 3431 - RNA, 21 nt, artificial
  siRNA Oligomer
uauccucacagguauucauca

SEQ ID NO: 3432 - RNA, 21 nt, artificial
  siRNA Oligomer
uugaguggaggcuaaauucuc

SEQ ID NO: 3433 - RNA, 21 nt, artificial
  siRNA Oligomer
ugaaucacuucuccaaaggcc

SEQ ID NO: 3434 - RNA, 21 nt, artificial
  siRNA Oligomer
uuccugucuaaaaacccuuca

SEQ ID NO: 3435 - RNA, 21 nt, artificial
  siRNA Oligomer
auucuggcaaguugauuccuc

SEQ ID NO: 3436 - RNA, 21 nt, artificial
  siRNA Oligomer
uucuuaacaagucgaaauccu

SEQ ID NO: 3437 - RNA, 21 nt, artificial
  siRNA Oligomer
uucaaauuugagucaggaacu

SEQ ID NO: 3438 - RNA, 21 nt, artificial
  siRNA Oligomer
uacuuaauccuaccuuccugu

SEQ ID NO: 3439 - RNA, 21 nt, artificial
  siRNA Oligomer
uuauccacgacccacagcaag

SEQ ID NO: 3440 - RNA, 21 nt, artificial
  siRNA Oligomer
ucacacacaauccuauccagc

SEQ ID NO: 3441 - RNA, 21 nt, artificial
  siRNA Oligomer
uuggguucaggaacaacauaa

SEQ ID NO: 3442 - RNA, 21 nt, artificial
  siRNA Oligomer
uuugaacagugacauuuuagg

SEQ ID NO: 3443 - RNA, 21 nt, artificial
  siRNA Oligomer
ucucagaacuaauuuccuauc

SEQ ID NO: 3444 - RNA, 21 nt, artificial
  siRNA Oligomer
auuaccaagccuaccugaaac

SEQ ID NO: 3445 - RNA, 21 nt, artificial
  siRNA Oligomer
uucuccaaaggccagaaaauc

SEQ ID NO: 3446 - RNA, 21 nt, artificial
  siRNA Oligomer
acuaauuuccuauccucacag

SEQ ID NO: 3447 - RNA, 21 nt, artificial
  siRNA Oligomer
uagucuauuaccaagccuacc

SEQ ID NO: 3448 - RNA, 21 nt, artificial
  siRNA Oligomer
ucuggacggugaguuucauuc

SEQ ID NO: 3449 - RNA, 21 nt, artificial
  siRNA Oligomer
ugaauaagcuccuuauccacg

SEQ ID NO: 3450 - RNA, 21 nt, artificial
  siRNA Oligomer
ucacagguauucaucauucac

SEQ ID NO: 3451 - RNA, 21 nt, artificial
  siRNA Oligomer
uuguugaguggaggcuaaauu

SEQ ID NO: 3452 - RNA, 21 nt, artificial
  siRNA Oligomer
acuauuuugaaucacuucucc

SEQ ID NO: 3453 - RNA, 21 nt, artificial
  siRNA Oligomer
auuugagucaggaacuggugg

SEQ ID NO: 3454 - RNA, 21 nt, artificial
  siRNA Oligomer
uuaauccuaccuuccugucua

SEQ ID NO: 3455 - RNA, 21 nt, artificial
  siRNA Oligomer
uucaggaacaacauaauccca

SEQ ID NO: 3456 - RNA, 21 nt, artificial
  siRNA Oligomer
uugauuuaucuuggcccaauu

SEQ ID NO: 3457 - RNA, 21 nt, artificial
  siRNA Oligomer
accugaauaagcuccuuaucc

SEQ ID NO: 3458 - RNA, 21 nt, artificial
  siRNA Oligomer
uuuguuagaacacuggcuaau

SEQ ID NO: 3459 - RNA, 21 nt, artificial
  siRNA Oligomer
uaaaccauaucuccauagcca

SEQ ID NO: 3460 - RNA, 21 nt, artificial
  siRNA Oligomer
uuaguuugcuuugauuuggac

SEQ ID NO: 3461 - RNA, 21 nt, artificial
  siRNA Oligomer
uucccuagugacagguaucca

SEQ ID NO: 3462 - RNA, 21 nt, artificial
  siRNA Oligomer
agugacagguauccaaggugg

SEQ ID NO: 3463 - RNA, 21 nt, artificial
  siRNA Oligomer
uucaucugagauuaagcacau

SEQ ID NO: 3464 - RNA, 21 nt, artificial
  siRNA Oligomer
uauucaucauucacucaaugg

SEQ ID NO: 3465 - RNA, 21 nt, artificial
  siRNA Oligomer
auaacuguuaguggaaaaagg

SEQ ID NO: 3466 - RNA, 21 nt, artificial
  siRNA Oligomer
ugcagacuucguaaauugacc

SEQ ID NO: 3467 - RNA, 21 nt, artificial
  siRNA Oligomer
uacuaagugaaucagagaggg

SEQ ID NO: 3468 - RNA, 21 nt, artificial
  siRNA Oligomer
uuaguggaaaaaggacaacag

SEQ ID NO: 3469 - RNA, 21 nt, artificial
  siRNA Oligomer
uuuguaguaucuuuccaagca

SEQ ID NO: 3470 - RNA, 21 nt, artificial
  siRNA Oligomer
uaugaaagccuugcugaauug

SEQ ID NO: 3471 - RNA, 21 nt, artificial
  siRNA Oligomer
uacgacgcuagaaucacacac

SEQ ID NO: 3472 - RNA, 21 nt, artificial
  siRNA Oligomer
uagucaaaaucacuuagcagg

SEQ ID NO: 3473 - RNA, 21 nt, artificial
  siRNA Oligomer
uaagcauaacaggcaagagag

SEQ ID NO: 3474 - RNA, 21 nt, artificial
  siRNA Oligomer
uuccaaguucacgugcauaac

SEQ ID NO: 3475 - RNA, 21 nt, artificial
  siRNA Oligomer
ucaaaugggcuucuacuuuug

SEQ ID NO: 3476 - RNA, 21 nt, artificial
  siRNA Oligomer
augugaaguggagcuaauagc

SEQ ID NO: 3477 - RNA, 21 nt, artificial
  siRNA Oligomer
ucaauggaagaguaaucaacu

SEQ ID NO: 3478 - RNA, 21 nt, artificial
  siRNA Oligomer
uccagcauuuuaaccaaauuc

SEQ ID NO: 3479 - RNA, 21 nt, artificial
  siRNA Oligomer
cuucaauucccagaaaagccc

SEQ ID NO: 3480 - RNA, 21 nt, artificial
  siRNA Oligomer
uuuuguaagcauaacaggcaa

SEQ ID NO: 3481 - RNA, 21 nt, artificial
  siRNA Oligomer
ucacgugcauaacacaaccuc

SEQ ID NO: 3482 - RNA, 21 nt, artificial
  siRNA Oligomer
uguaaaacucaaaugggcuuc

SEQ ID NO: 3483 - RNA, 21 nt, artificial
  siRNA Oligomer
acuucaauucccagaaaagcc

SEQ ID NO: 3484 - RNA, 21 nt, artificial
  siRNA Oligomer
aagaaaagagacuacauuugg

SEQ ID NO: 3485 - RNA, 21 nt, artificial
  siRNA Oligomer
ucaaagugguaguauacagcu

SEQ ID NO: 3486 - RNA, 21 nt, artificial
  siRNA Oligomer
aucugggugcaugcaugguua

SEQ ID NO: 3487 - RNA, 21 nt, artificial
  siRNA Oligomer
ucaggaacaacauaaucccag

SEQ ID NO: 3488 - RNA, 21 nt, artificial
  siRNA Oligomer
aacaguucuacaucgaugccc

SEQ ID NO: 3489 - RNA, 21 nt, artificial
  siRNA Oligomer
uucucugggucaguuucucag

SEQ ID NO: 3490 - RNA, 21 nt, artificial
  siRNA Oligomer
aaaggcaucuaaaacaacacc

SEQ ID NO: 3491 - RNA, 21 nt, artificial
  siRNA Oligomer
ucuugcugcucaaacugccag

SEQ ID NO: 3492 - RNA, 21 nt, artificial
  siRNA Oligomer
uaacacugccauggugaaaug

SEQ ID NO: 3493 - RNA, 21 nt, artificial
  siRNA Oligomer
uucaucauucacucaauggaa

SEQ ID NO: 3494 - RNA, 21 nt, artificial
  siRNA Oligomer
guucacgugcauaacacaacc

SEQ ID NO: 3495 - RNA, 21 nt, artificial
  siRNA Oligomer
aaaacaacaccgugguuacug

SEQ ID NO: 3496 - RNA, 21 nt, artificial
  siRNA Oligomer
uaguccaugagcaguucuccu

SEQ ID NO: 3497 - RNA, 21 nt, artificial
  siRNA Oligomer
uauucaacacuuaagaacagg

SEQ ID NO: 3498 - RNA, 21 nt, artificial
  siRNA Oligomer
uuuucaguaacaccaggauga

SEQ ID NO: 3499 - RNA, 21 nt, artificial
  siRNA Oligomer
uucccuuuuuaggacccuuca

SEQ ID NO: 3500 - RNA, 21 nt, artificial
  siRNA Oligomer
uauaaaccauaucuccauagc

SEQ ID NO: 3501 - RNA, 21 nt, artificial
  siRNA Oligomer
guuuguuagaacacuggcuaa

SEQ ID NO: 3502 - RNA, 21 nt, artificial
  siRNA Oligomer
uaccuuccugucuaaaaaccc

SEQ ID NO: 3503 - RNA, 21 nt, artificial
  siRNA Oligomer
uuuggagcuuaacaauagaca

SEQ ID NO: 3504 - RNA, 21 nt, artificial
  siRNA Oligomer
uuccuauccucacagguauuc

SEQ ID NO: 3505 - RNA, 21 nt, artificial
  siRNA Oligomer
uuauuauucccuagugacagg

SEQ ID NO: 3506 - RNA, 21 nt, artificial
  siRNA Oligomer
ucaguaacaccaggaugaaua

SEQ ID NO: 3507 - RNA, 21 nt, artificial
  siRNA Oligomer
aaauucuggcaaguugauucc

SEQ ID NO: 3508 - RNA, 21 nt, artificial
  siRNA Oligomer
aauccuauccagcuuuuuaca

SEQ ID NO: 3509 - RNA, 21 nt, artificial
  siRNA Oligomer
aaucacacacaauccuaucca

SEQ ID NO: 3510 - RNA, 21 nt, artificial
  siRNA Oligomer
auucaaagugguaguauacag

SEQ ID NO: 3511 - RNA, 21 nt, artificial
  siRNA Oligomer
cucagaacuaauuuccuaucc

SEQ ID NO: 3512 - RNA, 21 nt, artificial
  siRNA Oligomer
uugagcaaccaaguuuaguuu

SEQ ID NO: 3513 - RNA, 21 nt, artificial
  siRNA Oligomer
auccaagguggaaaaaaucug

SEQ ID NO: 3514 - RNA, 21 nt, artificial
  siRNA Oligomer
ucaccuacuuaauccuaccuu

SEQ ID NO: 3515 - RNA, 21 nt, artificial
  siRNA Oligomer
uugauuuggacagacaguucu

SEQ ID NO: 3516 - RNA, 21 nt, artificial
  siRNA Oligomer
uguacaaaaaugggaucuaug

SEQ ID NO: 3517 - RNA, 21 nt, artificial
  siRNA Oligomer
aguagguacgacgcuagaauc

SEQ ID NO: 3518 - RNA, 21 nt, artificial
  siRNA Oligomer
aucacuuagcaggcucucugg

SEQ ID NO: 3519 - RNA, 21 nt, artificial
  siRNA Oligomer
aagaggauagauuacuaagug

SEQ ID NO: 3520 - RNA, 21 nt, artificial
  siRNA Oligomer
aaaacauuagagugaggaagu

SEQ ID NO: 3521 - RNA, 21 nt, artificial
  siRNA Oligomer
ucucugggucaguuucucagg

SEQ ID NO: 3522 - RNA, 21 nt, artificial
  siRNA Oligomer
uucacgugcauaacacaaccu

SEQ ID NO: 3523 - RNA, 21 nt, artificial
  siRNA Oligomer
uugaaucacuucuccaaaggc

SEQ ID NO: 3524 - RNA, 21 nt, artificial
  siRNA Oligomer
ugauuuggacagacaguucuc

SEQ ID NO: 3525 - RNA, 21 nt, artificial
  siRNA Oligomer
uuuccaagcauuugaagaguu

SEQ ID NO: 3526 - RNA, 21 nt, artificial
  siRNA Oligomer
uccucaaauauuaccucguug

SEQ ID NO: 3527 - RNA, 21 nt, artificial
  siRNA Oligomer
cuacuuuugcuuaccuauucc

SEQ ID NO: 3528 - RNA, 21 nt, artificial
  siRNA Oligomer
aucuaugcagaaaaucuacac

SEQ ID NO: 3529 - RNA, 21 nt, artificial
  siRNA Oligomer
ugaauugaacauuguugagug

SEQ ID NO: 3530 - RNA, 21 nt, artificial
  siRNA Oligomer
ugcugaauugaacauuguuga

SEQ ID NO: 3531 - RNA, 21 nt, artificial
  siRNA Oligomer
ugauuuaucuuggcccaauuc

SEQ ID NO: 3532 - RNA, 21 nt, artificial
  siRNA Oligomer
accauuuuguaagcauaacag

SEQ ID NO: 3533 - RNA, 21 nt, artificial
  siRNA Oligomer
uuugcuuugauuuggacagac

SEQ ID NO: 3534 - RNA, 21 nt, artificial
  siRNA Oligomer
aaggagagauacuucaauucc

SEQ ID NO: 3535 - RNA, 21 nt, artificial
  siRNA Oligomer
uccauagccaaugcagacuuc

SEQ ID NO: 3536 - RNA, 21 nt, artificial
  siRNA Oligomer
auuacuaagugaaucagagag

SEQ ID NO: 3537 - RNA, 21 nt, artificial
  siRNA Oligomer
uaagugaaucagagagggacu

SEQ ID NO: 3538 - RNA, 21 nt, artificial
  siRNA Oligomer
uauuuucccuuuuuaggaccc

SEQ ID NO: 3539 - RNA, 21 nt, artificial
  siRNA Oligomer
aauauuaccucguugagguug

SEQ ID NO: 3540 - RNA, 21 nt, artificial
  siRNA Oligomer
uuuagcugacuagcugaauag

SEQ ID NO: 3541 - RNA, 21 nt, artificial
  siRNA Oligomer
ucaaucacuguuguuccaauc

SEQ ID NO: 3542 - RNA, 21 nt, artificial
  siRNA Oligomer
aaucagagagggacuagaucu

SEQ ID NO: 3543 - RNA, 21 nt, artificial
  siRNA Oligomer
uagccaaugcagacuucguaa

SEQ ID NO: 3544 - RNA, 21 nt, artificial
  siRNA Oligomer
uacuucaauucccagaaaagc

SEQ ID NO: 3545 - RNA, 21 nt, artificial
  siRNA Oligomer
cuuccugucuaaaaacccuuc

SEQ ID NO: 3546 - RNA, 21 nt, artificial
  siRNA Oligomer
uacaucgaugcccaagaagcc

SEQ ID NO: 3547 - RNA, 21 nt, artificial
  siRNA Oligomer
ucaaacugccaguugcaacca

SEQ ID NO: 3548 - RNA, 21 nt, artificial
  siRNA Oligomer
aucaaaauaggcaaaucuggu

SEQ ID NO: 3549 - RNA, 21 nt, artificial
  siRNA Oligomer
uccaaguucacgugcauaaca

SEQ ID NO: 3550 - RNA, 21 nt, artificial
  siRNA Oligomer
auuagagugaggaagucacca

SEQ ID NO: 3551 - RNA, 21 nt, artificial
  siRNA Oligomer
uggaaaaaaucugggugcaug

SEQ ID NO: 3552 - RNA, 21 nt, artificial
  siRNA Oligomer
uuaacagccuuccauaagcca

SEQ ID NO: 3553 - RNA, 21 nt, artificial
  siRNA Oligomer
uugagguuggguucaggaaca

SEQ ID NO: 3554 - RNA, 21 nt, artificial
  siRNA Oligomer
acuuaauccuaccuuccuguc

SEQ ID NO: 3555 - RNA, 21 nt, artificial
  siRNA Oligomer
uuacucuuaccuaggguuaag

SEQ ID NO: 3556 - RNA, 21 nt, artificial
  siRNA Oligomer
uguuccaaucagugaguaaag

SEQ ID NO: 3557 - RNA, 21 nt, artificial
  siRNA Oligomer
uuugagucaggaacugguggu

SEQ ID NO: 3558 - RNA, 21 nt, artificial
  siRNA Oligomer
aacauugauuuaucuuggccc

SEQ ID NO: 3559 - RNA, 21 nt, artificial
  siRNA Oligomer
uucguaaauugacccguuuca

SEQ ID NO: 3560 - RNA, 21 nt, artificial
  siRNA Oligomer
aucgaugcccaagaagccuug

SEQ ID NO: 3561 - RNA, 21 nt, artificial
  siRNA Oligomer
uugagucaggaacugguggug

SEQ ID NO: 3562 - RNA, 21 nt, artificial
  siRNA Oligomer
uucuggcaaguugauuccuca

SEQ ID NO: 3563 - RNA, 21 nt, artificial
  siRNA Oligomer
auaugaaagccuugcugaauu

SEQ ID NO: 3564 - RNA, 21 nt, artificial
  siRNA Oligomer
ucuuggcccaauucuauaaag

SEQ ID NO: 3565 - RNA, 21 nt, artificial
  siRNA Oligomer
ugccaguugcaaccaugguca

SEQ ID NO: 3566 - RNA, 21 nt, artificial
  siRNA Oligomer
ucuccaaaggccagaaaauca

SEQ ID NO: 3567 - RNA, 21 nt, artificial
  siRNA Oligomer
uaaggccuuuauuauucccua

SEQ ID NO: 3568 - RNA, 21 nt, artificial
  siRNA Oligomer
ucaaauauuaccucguugagg

SEQ ID NO: 3569 - RNA, 21 nt, artificial
  siRNA Oligomer
aauaaggccuuuauuauuccc

SEQ ID NO: 3570 - RNA, 21 nt, artificial
  siRNA Oligomer
auagucuauuaccaagccuac

SEQ ID NO: 3571 - RNA, 21 nt, artificial
  siRNA Oligomer
uugcuuugauuuggacagaca

SEQ ID NO: 3572 - RNA, 21 nt, artificial
  siRNA Oligomer
uuacugaaauggcaccacaag

SEQ ID NO: 3573 - RNA, 21 nt, artificial
  siRNA Oligomer
ucaauucuguacaaaaauggg

SEQ ID NO: 3574 - RNA, 21 nt, artificial
  siRNA Oligomer
uagcugaauaguuuuacuacc

SEQ ID NO: 3575 - RNA, 21 nt, artificial
  siRNA Oligomer
uuuccaaguucacgugcauaa

SEQ ID NO: 3576 - RNA, 21 nt, artificial
  siRNA Oligomer
uuagagugaggaagucaccaa

SEQ ID NO: 3577 - RNA, 21 nt, artificial
  siRNA Oligomer
uaccuauuccaucccauucaa

SEQ ID NO: 3578 - RNA, 21 nt, artificial
  siRNA Oligomer
uacuuuugcuuaccuauucca

SEQ ID NO: 3579 - RNA, 21 nt, artificial
  siRNA Oligomer
uguaguaucuuuccaagcauu

SEQ ID NO: 3580 - RNA, 21 nt, artificial
  siRNA Oligomer
uacagcuacuacccuugacaa

SEQ ID NO: 3581 - RNA, 21 nt, artificial
  siRNA Oligomer
uccugaaaccagaggagaagc

SEQ ID NO: 3582 - RNA, 21 nt, artificial
  siRNA Oligomer
aaaagucccugaagcuagucc

SEQ ID NO: 3583 - RNA, 21 nt, artificial
  siRNA Oligomer
cuaccuuccugucuaaaaacc

SEQ ID NO: 3584 - RNA, 21 nt, artificial
  siRNA Oligomer
uaaccaaauucuggcaaguug

SEQ ID NO: 3585 - RNA, 21 nt, artificial
  siRNA Oligomer
uucuacaucgaugcccaagaa

SEQ ID NO: 3586 - RNA, 21 nt, artificial
  siRNA Oligomer
ucuaaaacaacaccgugguua

SEQ ID NO: 3587 - RNA, 21 nt, artificial
  siRNA Oligomer
uaccaagccuaccugaaacca

SEQ ID NO: 3588 - RNA, 21 nt, artificial
  siRNA Oligomer
ugaaguggagcuaauagcuag

SEQ ID NO: 3589 - RNA, 21 nt, artificial
  siRNA Oligomer
uaggucacuuauaguaucagu

SEQ ID NO: 3590 - RNA, 21 nt, artificial
  siRNA Oligomer
uuuuaaccaaauucuggcaag

SEQ ID NO: 3591 - RNA, 21 nt, artificial
  siRNA Oligomer
uucuuauuuagggcagguggg

SEQ ID NO: 3592 - RNA, 21 nt, artificial
  siRNA Oligomer
cuacuuaauccuaccuuccug

SEQ ID NO: 3593 - RNA, 21 nt, artificial
  siRNA Oligomer
auaacacaaccucgcaagccg

SEQ ID NO: 3594 - RNA, 21 nt, artificial
  siRNA Oligomer
uuuccuauccucacagguauu

SEQ ID NO: 3595 - RNA, 21 nt, artificial
  siRNA Oligomer
agaaucacacacaauccuauc

SEQ ID NO: 3596 - RNA, 21 nt, artificial
  siRNA Oligomer
aaaacccuucaaauuugaguc

SEQ ID NO: 3597 - RNA, 21 nt, artificial
  siRNA Oligomer
uuuguaagcauaacaggcaag

SEQ ID NO: 3598 - RNA, 21 nt, artificial
  siRNA Oligomer
augacuuuagcugacuagcug

SEQ ID NO: 3599 - RNA, 21 nt, artificial
  siRNA Oligomer
uguaagcucaaaaguagguac

SEQ ID NO: 3600 - RNA, 21 nt, artificial
  siRNA Oligomer
ugaggaucagaguucuccuga

SEQ ID NO: 3601 - RNA, 21 nt, artificial
  siRNA Oligomer
ugauuccucaaauauuaccuc

SEQ ID NO: 3602 - RNA, 21 nt, artificial
  siRNA Oligomer
gauuccucaaauauuaccucg

SEQ ID NO: 3603 - RNA, 21 nt, artificial
  siRNA Oligomer
agugaagcaguuccauuauug

SEQ ID NO: 3604 - RNA, 21 nt, artificial
  siRNA Oligomer
uucucagggacaaggaccuuu

SEQ ID NO: 3605 - RNA, 21 nt, artificial
  siRNA Oligomer
ucaaaaguagguacgacgcua

SEQ ID NO: 3606 - RNA, 21 nt, artificial
  siRNA Oligomer
aaucaaaauaggcaaaucugg

SEQ ID NO: 3607 - RNA, 21 nt, artificial
  siRNA Oligomer
auagcuagggcaggaaaccug

SEQ ID NO: 3608 - RNA, 21 nt, artificial
  siRNA Oligomer
ucucuaggcuguacuauaaac

SEQ ID NO: 3609 - RNA, 21 nt, artificial
  siRNA Oligomer
accaggaugaauacaucuguc

SEQ ID NO: 3610 - RNA, 21 nt, artificial
  siRNA Oligomer
gaguuuaguuuguuagaacac

SEQ ID NO: 3611 - RNA, 21 nt, artificial
  siRNA Oligomer
accuacuuaauccuaccuucc

SEQ ID NO: 3612 - RNA, 21 nt, artificial
  siRNA Oligomer
uuccucaaauauuaccucguu

SEQ ID NO: 3613 - RNA, 21 nt, artificial
  siRNA Oligomer
uucauucucuaggcuguacua

SEQ ID NO: 3614 - RNA, 21 nt, artificial
  siRNA Oligomer
aacaagucgaaauccugagcu

SEQ ID NO: 3615 - RNA, 21 nt, artificial
  siRNA Oligomer
gucuauuaccaagccuaccug

SEQ ID NO: 3616 - RNA, 21 nt, artificial
  siRNA Oligomer
uuuucccuuuuuaggacccuu

SEQ ID NO: 3617 - RNA, 21 nt, artificial
  siRNA Oligomer
uucuguacaaaaaugggaucu

SEQ ID NO: 3618 - RNA, 21 nt, artificial
  siRNA Oligomer
augguucaucugagauuaagc

SEQ ID NO: 3619 - RNA, 21 nt, artificial
  siRNA Oligomer
auucccuagugacagguaucc

SEQ ID NO: 3620 - RNA, 21 nt, artificial
  siRNA Oligomer
aauuugagucaggaacuggug

SEQ ID NO: 3621 - RNA, 21 nt, artificial
  siRNA Oligomer
ucaucauucacucaauggaag

SEQ ID NO: 3622 - RNA, 21 nt, artificial
  siRNA Oligomer
acccguuucaauaauucaaag

SEQ ID NO: 3623 - RNA, 21 nt, artificial
  siRNA Oligomer
agucaaaaucacuuagcaggc

SEQ ID NO: 3624 - RNA, 21 nt, artificial
  siRNA Oligomer
guuagaacacuggcuaauuug

SEQ ID NO: 3625 - RNA, 21 nt, artificial
  siRNA Oligomer
uaacaggcaagagagucaaag

SEQ ID NO: 3626 - RNA, 21 nt, artificial
  siRNA Oligomer
ucaguaacaggaucacaccug

SEQ ID NO: 3627 - RNA, 21 nt, artificial
  siRNA Oligomer
uuccaaucagugaguaaaguu

SEQ ID NO: 3628 - RNA, 21 nt, artificial
  siRNA Oligomer
ucaguuucucagggacaagga

SEQ ID NO: 3629 - RNA, 21 nt, artificial
  siRNA Oligomer
uccauaagccaucaccauuuu

SEQ ID NO: 3630 - RNA, 21 nt, artificial
  siRNA Oligomer
uguuagaacacuggcuaauuu

SEQ ID NO: 3631 - RNA, 21 nt, artificial
  siRNA Oligomer
cuuaccuauuccaucccauuc

SEQ ID NO: 3632 - RNA, 21 nt, artificial
  siRNA Oligomer
auuuaacagccuuccauaagc

SEQ ID NO: 3633 - RNA, 21 nt, artificial
  siRNA Oligomer
uaguauacagcuacuacccuu

SEQ ID NO: 3634 - RNA, 21 nt, artificial
  siRNA Oligomer
uuaucuggacggugaguuuca

SEQ ID NO: 3635 - RNA, 21 nt, artificial
  siRNA Oligomer
agaaaaagucccugaagcuag

SEQ ID NO: 3636 - RNA, 21 nt, artificial
  siRNA Oligomer
uguuguuccaaucagugagua

SEQ ID NO: 3637 - RNA, 21 nt, artificial
  siRNA Oligomer
ucccaguagucaaaaucacuu

SEQ ID NO: 3638 - RNA, 21 nt, artificial
  siRNA Oligomer
ugaagcaguuccauuauugcc

SEQ ID NO: 3639 - RNA, 21 nt, artificial
  siRNA Oligomer
agcugaauaguuuuacuaccc

SEQ ID NO: 3640 - RNA, 21 nt, artificial
  siRNA Oligomer
acaaaaaugggaucuaugcag

SEQ ID NO: 3641 - RNA, 21 nt, artificial
  siRNA Oligomer
cuuuuguugccucuuuaaaac

SEQ ID NO: 3642 - RNA, 21 nt, artificial
  siRNA Oligomer
uaccucguugagguuggguuc

SEQ ID NO: 3643 - RNA, 21 nt, artificial
  siRNA Oligomer
ugugaaguggagcuaauagcu

SEQ ID NO: 3644 - RNA, 21 nt, artificial
  siRNA Oligomer
augaaugugaaacacagaaag

SEQ ID NO: 3645 - RNA, 21 nt, artificial
  siRNA Oligomer
agccacaguccagcaauucug

SEQ ID NO: 3646 - RNA, 21 nt, artificial
  siRNA Oligomer
ugagcaaccaaguuuaguuug

SEQ ID NO: 3647 - RNA, 21 nt, artificial
  siRNA Oligomer
ucuacaucgaugcccaagaag

SEQ ID NO: 3648 - RNA, 21 nt, artificial
  siRNA Oligomer
uauacagcuacuacccuugac

SEQ ID NO: 3649 - RNA, 21 nt, artificial
  siRNA Oligomer
uagcuagggcaggaaaccuga

SEQ ID NO: 3650 - RNA, 21 nt, artificial
  siRNA Oligomer
aaggacaacaguucuacaucg

SEQ ID NO: 3651 - RNA, 21 nt, artificial
  siRNA Oligomer
acaguucuacaucgaugccca

SEQ ID NO: 3652 - RNA, 21 nt, artificial
  siRNA Oligomer
ugguaguauacagcuacuacc

SEQ ID NO: 3653 - RNA, 21 nt, artificial
  siRNA Oligomer
ugaaacacagaaagaaaagag

SEQ ID NO: 3654 - RNA, 21 nt, artificial
  siRNA Oligomer
uuuggacagacaguucuccag

SEQ ID NO: 3655 - RNA, 21 nt, artificial
  siRNA Oligomer
uugcccagucaguggugacaa

SEQ ID NO: 3656 - RNA, 21 nt, artificial
  siRNA Oligomer
guuuaguuugcuuugauuugg

SEQ ID NO: 3657 - RNA, 21 nt, artificial
  siRNA Oligomer
cuuuguaguaucuuuccaagc

SEQ ID NO: 3658 - RNA, 21 nt, artificial
  siRNA Oligomer
cagagaugagauaacacugcc

SEQ ID NO: 3659 - RNA, 21 nt, artificial
  siRNA Oligomer
uuccaucccauucaauucugu

SEQ ID NO: 3660 - RNA, 21 nt, artificial
  siRNA Oligomer
ucacuguuguuccaaucagug

SEQ ID NO: 3661 - RNA, 21 nt, artificial
  siRNA Oligomer
uacucuuaccuaggguuaagc

SEQ ID NO: 3662 - RNA, 21 nt, artificial
  siRNA Oligomer
uuguaagcauaacaggcaaga

SEQ ID NO: 3663 - RNA, 21 nt, artificial
  siRNA Oligomer
agucaaagauaacuguuagug

SEQ ID NO: 3664 - RNA, 21 nt, artificial
  siRNA Oligomer
aaaaucacuuagcaggcucuc

SEQ ID NO: 3665 - RNA, 21 nt, artificial
  siRNA Oligomer
ugagucaggaacugguggugu

SEQ ID NO: 3666 - RNA, 21 nt, artificial
  siRNA Oligomer
cuacccaaucaugaaauaauc

SEQ ID NO: 3667 - RNA, 21 nt, artificial
  siRNA Oligomer
uuguaguaucuuuccaagcau

SEQ ID NO: 3668 - RNA, 21 nt, artificial
  siRNA Oligomer
uacaaaaaugggaucuaugca

SEQ ID NO: 3669 - RNA, 21 nt, artificial
  siRNA Oligomer
uauagucuauuaccaagccua

SEQ ID NO: 3670 - RNA, 21 nt, artificial
  siRNA Oligomer
uaaucccaguagucaaaauca

SEQ ID NO: 3671 - RNA, 21 nt, artificial
  siRNA Oligomer
ucuaggcuguacuauaaacca

SEQ ID NO: 3672 - RNA, 21 nt, artificial
  siRNA Oligomer
auaucuccauagccaaugcag

SEQ ID NO: 3673 - RNA, 21 nt, artificial
  siRNA Oligomer
uaucuuggcccaauucuauaa

SEQ ID NO: 3674 - RNA, 21 nt, artificial
  siRNA Oligomer
aaagauuggcuuuguaguauc

SEQ ID NO: 3675 - RNA, 21 nt, artificial
  siRNA Oligomer
aaggauaugaaagccuugcug

SEQ ID NO: 3676 - RNA, 21 nt, artificial
  siRNA Oligomer
auagccacaguccagcaauuc

SEQ ID NO: 3677 - RNA, 21 nt, artificial
  siRNA Oligomer
ucuuaacaagucgaaauccug

SEQ ID NO: 3678 - RNA, 21 nt, artificial
  siRNA Oligomer
aguuucucagggacaaggacc

SEQ ID NO: 3679 - RNA, 21 nt, artificial
  siRNA Oligomer
accuguuuuucaguaacacca

SEQ ID NO: 3680 - RNA, 21 nt, artificial
  siRNA Oligomer
cacagguauucaucauucacu

SEQ ID NO: 3681 - RNA, 21 nt, artificial
  siRNA Oligomer
caagagagucaaagauaacug

SEQ ID NO: 3682 - RNA, 21 nt, artificial
  siRNA Oligomer
aagcaguuccauuauugccgu

SEQ ID NO: 3683 - RNA, 21 nt, artificial
  siRNA Oligomer
uggcaaguugauuccucaaau

SEQ ID NO: 3684 - RNA, 21 nt, artificial
  siRNA Oligomer
auauuaccucguugagguugg

SEQ ID NO: 3685 - RNA, 21 nt, artificial
  siRNA Oligomer
auucaacacuuaagaacaggg

SEQ ID NO: 3686 - RNA, 21 nt, artificial
  siRNA Oligomer
acugccauggugaaaugguuc

SEQ ID NO: 3687 - RNA, 21 nt, artificial
  siRNA Oligomer
ugaguuucauucucuaggcug

SEQ ID NO: 3688 - RNA, 21 nt, artificial
  siRNA Oligomer
uuuuggaaguuuugauaggcu

SEQ ID NO: 3689 - RNA, 21 nt, artificial
  siRNA Oligomer
ugcauaacacaaccucgcaag

SEQ ID NO: 3690 - RNA, 21 nt, artificial
  siRNA Oligomer
uaaaacucaaaugggcuucua

SEQ ID NO: 3691 - RNA, 21 nt, artificial
  siRNA Oligomer
uauuauucccuagugacaggu

SEQ ID NO: 3692 - RNA, 21 nt, artificial
  siRNA Oligomer
uacaaaugacuuuagcugacu

SEQ ID NO: 3693 - RNA, 21 nt, artificial
  siRNA Oligomer
gauuaagcacauguaauacug

SEQ ID NO: 3694 - RNA, 21 nt, artificial
  siRNA Oligomer
aagguggaaaaaaucugggug

SEQ ID NO: 3695 - RNA, 21 nt, artificial
  siRNA Oligomer
aagccaucaccauuuuguaag

SEQ ID NO: 3696 - RNA, 21 nt, artificial
  siRNA Oligomer
uucuccagcauuuuaaccaaa

SEQ ID NO: 3697 - RNA, 21 nt, artificial
  siRNA Oligomer
ucacucaauggaagaguaauc

SEQ ID NO: 3698 - RNA, 21 nt, artificial
  siRNA Oligomer
uggagcuuaacaauagacaug

SEQ ID NO: 3699 - RNA, 21 nt, artificial
  siRNA Oligomer
ugaauacaucugucccuacgc

SEQ ID NO: 3700 - RNA, 21 nt, artificial
  siRNA Oligomer
uugcaaccauggucaacggcu

SEQ ID NO: 3701 - RNA, 21 nt, artificial
  siRNA Oligomer
ucugagauuaagcacauguaa

SEQ ID NO: 3702 - RNA, 21 nt, artificial
  siRNA Oligomer
uucccagaaaagcccagagau

SEQ ID NO: 3703 - RNA, 21 nt, artificial
  siRNA Oligomer
gucaguuucucagggacaagg

SEQ ID NO: 3704 - RNA, 21 nt, artificial
  siRNA Oligomer
auuuaucuuggcccaauucua

SEQ ID NO: 3705 - RNA, 21 nt, artificial
  siRNA Oligomer
ucuacuaaagaaaaagucccu

SEQ ID NO: 3706 - RNA, 21 nt, artificial
  siRNA Oligomer
agguauucaucauucacucaa

SEQ ID NO: 3707 - RNA, 21 nt, artificial
  siRNA Oligomer
acaacaguucuacaucgaugc

SEQ ID NO: 3708 - RNA, 21 nt, artificial
  siRNA Oligomer
ucguaaauugacccguuucaa

SEQ ID NO: 3709 - RNA, 21 nt, artificial
  siRNA Oligomer
cuccauagccaaugcagacuu

SEQ ID NO: 3710 - RNA, 21 nt, artificial
  siRNA Oligomer
uuggagcuuaacaauagacau

SEQ ID NO: 3711 - RNA, 21 nt, artificial
  siRNA Oligomer
auugauuuaucuuggcccaau

SEQ ID NO: 3712 - RNA, 21 nt, artificial
  siRNA Oligomer
ugguucaucugagauuaagca

SEQ ID NO: 3713 - RNA, 21 nt, artificial
  siRNA Oligomer
aacuacaaaugacuuuagcug

SEQ ID NO: 3714 - RNA, 21 nt, artificial
  siRNA Oligomer
aggacaucuugagcaauucuc

SEQ ID NO: 3715 - RNA, 21 nt, artificial
  siRNA Oligomer
auaaaccauaucuccauagcc

SEQ ID NO: 3716 - RNA, 21 nt, artificial
  siRNA Oligomer
aguggagcuaauagcuagggc

SEQ ID NO: 3717 - RNA, 21 nt, artificial
  siRNA Oligomer
uccagcaauucugaaaugcug

SEQ ID NO: 3718 - RNA, 21 nt, artificial
  siRNA Oligomer
aaguguaagcucaaaaguagg

SEQ ID NO: 3719 - RNA, 21 nt, artificial
  siRNA Oligomer
acaucuugagcaauucucugg

SEQ ID NO: 3720 - RNA, 21 nt, artificial
  siRNA Oligomer
agucuauuaccaagccuaccu

SEQ ID NO: 3721 - RNA, 21 nt, artificial
  siRNA Oligomer
auaaucccaguagucaaaauc

SEQ ID NO: 3722 - RNA, 21 nt, artificial
  siRNA Oligomer
auccucacagguauucaucau

SEQ ID NO: 3723 - RNA, 21 nt, artificial
  siRNA Oligomer
aacacagugaaccuuuggagc

SEQ ID NO: 3724 - RNA, 21 nt, artificial
  siRNA Oligomer
auaguaucaguaacaggauca

SEQ ID NO: 3725 - RNA, 21 nt, artificial
  siRNA Oligomer
augcagacuucguaaauugac

SEQ ID NO: 3726 - RNA, 21 nt, artificial
  siRNA Oligomer
auggucaacggcucuguuucc

SEQ ID NO: 3727 - RNA, 21 nt, artificial
  siRNA Oligomer
acaggaucacaccuguuuuuc

SEQ ID NO: 3728 - RNA, 21 nt, artificial
  siRNA Oligomer
uacuaaagaaaaagucccuga

SEQ ID NO: 3729 - RNA, 21 nt, artificial
  siRNA Oligomer
aguuuuacuacccaaucauga

SEQ ID NO: 3730 - RNA, 21 nt, artificial
  siRNA Oligomer
agucccugaagcuaguccaug

SEQ ID NO: 3731 - RNA, 21 nt, artificial
  siRNA Oligomer
acgugcauaacacaaccucgc

SEQ ID NO: 3732 - RNA, 21 nt, artificial
  siRNA Oligomer
uuaccucguugagguuggguu

SEQ ID NO: 3733 - RNA, 21 nt, artificial
  siRNA Oligomer
cuguacuauaaaccauaucuc

SEQ ID NO: 3734 - RNA, 21 nt, artificial
  siRNA Oligomer
aucaguaacaggaucacaccu

SEQ ID NO: 3735 - RNA, 21 nt, artificial
  siRNA Oligomer
aauucucugggucaguuucuc

SEQ ID NO: 3736 - RNA, 21 nt, artificial
  siRNA Oligomer
ugggaucuaugcagaaaaucu

SEQ ID NO: 3737 - RNA, 21 nt, artificial
  siRNA Oligomer
aauucuggcaaguugauuccu

SEQ ID NO: 3738 - RNA, 21 nt, artificial
  siRNA Oligomer
aaaaucugggugcaugcaugg

SEQ ID NO: 3739 - RNA, 21 nt, artificial
  siRNA Oligomer
uaguggaaaaaggacaacagu

SEQ ID NO: 3740 - RNA, 21 nt, artificial
  siRNA Oligomer
auuuacucuuaccuaggguua

SEQ ID NO: 3741 - RNA, 21 nt, artificial
  siRNA Oligomer
uucaguaacaccaggaugaau

SEQ ID NO: 3742 - RNA, 21 nt, artificial
  siRNA Oligomer
auaaggccuuuauuauucccu

SEQ ID NO: 3743 - RNA, 21 nt, artificial
  siRNA Oligomer
ugaaccuuuggagcuuaacaa

SEQ ID NO: 3744 - RNA, 21 nt, artificial
  siRNA Oligomer
ucagaguucuccugaaaccag

SEQ ID NO: 3745 - RNA, 21 nt, artificial
  siRNA Oligomer
uggcuuuguaguaucuuucca

SEQ ID NO: 3746 - RNA, 21 nt, artificial
  siRNA Oligomer
auccugagcugaggaucagag

SEQ ID NO: 3747 - RNA, 21 nt, artificial
  siRNA Oligomer
ugcugcucaaacugccaguug

SEQ ID NO: 3748 - RNA, 21 nt, artificial
  siRNA Oligomer
augggcuucuacuuuugcuua

SEQ ID NO: 3749 - RNA, 21 nt, artificial
  siRNA Oligomer
augggaucuaugcagaaaauc

SEQ ID NO: 3750 - RNA, 21 nt, artificial
  siRNA Oligomer
guggaaucaaauguaaaacuc

SEQ ID NO: 3751 - RNA, 21 nt, artificial
  siRNA Oligomer
uggagcuaauagcuagggcag

SEQ ID NO: 3752 - RNA, 21 nt, artificial
  siRNA Oligomer
ucaaagauaacuguuagugga

SEQ ID NO: 3753 - RNA, 21 nt, artificial
  siRNA Oligomer
auauagucuauuaccaagccu

SEQ ID NO: 3754 - RNA, 21 nt, artificial
  siRNA Oligomer
ugaaauggcaccacaagcuuu

SEQ ID NO: 3755 - RNA, 21 nt, artificial
  siRNA Oligomer
uuuggaaguuuugauaggcua

SEQ ID NO: 3756 - RNA, 21 nt, artificial
  siRNA Oligomer
ucuacuuaguuggaauaagac

SEQ ID NO: 3757 - RNA, 21 nt, artificial
  siRNA Oligomer
acuacaaaugacuuuagcuga

SEQ ID NO: 3758 - RNA, 21 nt, artificial
  siRNA Oligomer
ucagccuguuagcugcaguug

SEQ ID NO: 3759 - RNA, 21 nt, artificial
  siRNA Oligomer
agcucaaaaguagguacgacg

SEQ ID NO: 3760 - RNA, 21 nt, artificial
  siRNA Oligomer
aggacccuucaaucacuguug

SEQ ID NO: 3761 - RNA, 21 nt, artificial
  siRNA Oligomer
aagaaacagugaagcaguucc

SEQ ID NO: 3762 - RNA, 21 nt, artificial
  siRNA Oligomer
ccaagguggaaaaaaucuggg

SEQ ID NO: 3763 - RNA, 21 nt, artificial
  siRNA Oligomer
aaugguucaucugagauuaag

SEQ ID NO: 3764 - RNA, 21 nt, artificial
  siRNA Oligomer
uaacaggaucacaccuguuuu

SEQ ID NO: 3765 - RNA, 21 nt, artificial
  siRNA Oligomer
ucagagagggacuagaucuca

SEQ ID NO: 3766 - RNA, 21 nt, artificial
  siRNA Oligomer
aaccaaguuuaguuugcuuug

SEQ ID NO: 3767 - RNA, 21 nt, artificial
  siRNA Oligomer
uucuugcugcucaaacugcca

SEQ ID NO: 3768 - RNA, 21 nt, artificial
  siRNA Oligomer
ugaggaagucaccaagaaaca

SEQ ID NO: 3769 - RNA, 21 nt, artificial
  siRNA Oligomer
uagaacacuggcuaauuugaa

SEQ ID NO: 3770 - RNA, 21 nt, artificial
  siRNA Oligomer
accaagaaacagugaagcagu

SEQ ID NO: 3771 - RNA, 21 nt, artificial
  siRNA Oligomer
ucuugagcaauucucuggguc

SEQ ID NO: 3772 - RNA, 21 nt, artificial
  siRNA Oligomer
uaaggagagauacuucaauuc

SEQ ID NO: 3773 - RNA, 21 nt, artificial
  siRNA Oligomer
ugaaucagagagggacuagau

SEQ ID NO: 3774 - RNA, 21 nt, artificial
  siRNA Oligomer
aguaucuuuccaagcauuuga

SEQ ID NO: 3775 - RNA, 21 nt, artificial
  siRNA Oligomer
agcuacuacccuugacaauug

SEQ ID NO: 3776 - RNA, 21 nt, artificial
  siRNA Oligomer
aacccuucaaauuugagucag

SEQ ID NO: 3777 - RNA, 21 nt, artificial
  siRNA Oligomer
uaagccaucaccauuuuguaa

SEQ ID NO: 3778 - RNA, 21 nt, artificial
  siRNA Oligomer
auucccagaaaagcccagaga

SEQ ID NO: 3779 - RNA, 21 nt, artificial
  siRNA Oligomer
aacugguggugugggcuuuug

SEQ ID NO: 3780 - RNA, 21 nt, artificial
  siRNA Oligomer
cuagaaucacacacaauccua

SEQ ID NO: 3781 - RNA, 21 nt, artificial
  siRNA Oligomer
uaguaucuuuccaagcauuug

SEQ ID NO: 3782 - RNA, 21 nt, artificial
  siRNA Oligomer
acuuauaguaucaguaacagg

SEQ ID NO: 3783 - RNA, 21 nt, artificial
  siRNA Oligomer
agguggaaaaaaucugggugc

SEQ ID NO: 3784 - RNA, 21 nt, artificial
  siRNA Oligomer
ugccucuuuaaaacauuagag

SEQ ID NO: 3785 - RNA, 21 nt, artificial
  siRNA Oligomer
ucaaauuugagucaggaacug

SEQ ID NO: 3786 - RNA, 21 nt, artificial
  siRNA Oligomer
aaacacagaaagaaaagagac

SEQ ID NO: 3787 - RNA, 21 nt, artificial
  siRNA Oligomer
cuaugcagaaaaucuacacua

SEQ ID NO: 3788 - RNA, 21 nt, artificial
  siRNA Oligomer
acucaccuacuuaauccuacc

SEQ ID NO: 3789 - RNA, 21 nt, artificial
  siRNA Oligomer
uagguacgacgcuagaaucac

SEQ ID NO: 3790 - RNA, 21 nt, artificial
  siRNA Oligomer
caguucuccagcauuuuaacc

SEQ ID NO: 3791 - RNA, 21 nt, artificial
  siRNA Oligomer
uggugaaaugguucaucugag

SEQ ID NO: 3792 - RNA, 21 nt, artificial
  siRNA Oligomer
auucucugggucaguuucuca

SEQ ID NO: 3793 - RNA, 21 nt, artificial
  siRNA Oligomer
aggaccuuugagcaaccaagu

SEQ ID NO: 3794 - RNA, 21 nt, artificial
  siRNA Oligomer
aaacucaccuacuuaauccua

SEQ ID NO: 3795 - RNA, 21 nt, artificial
  siRNA Oligomer
uaaacucaccuacuuaauccu

SEQ ID NO: 3796 - RNA, 21 nt, artificial
  siRNA Oligomer
uaacuguuaguggaaaaagga

SEQ ID NO: 3797 - RNA, 21 nt, artificial
  siRNA Oligomer
uaaacacaggcagguggcuuc

SEQ ID NO: 3798 - RNA, 21 nt, artificial
  siRNA Oligomer
cuacaucgaugcccaagaagc

SEQ ID NO: 3799 - RNA, 21 nt, artificial
  siRNA Oligomer
ugcuuugauuuggacagacag

SEQ ID NO: 3800 - RNA, 21 nt, artificial
  siRNA Oligomer
aucacacacaauccuauccag

SEQ ID NO: 3801 - RNA, 21 nt, artificial
  siRNA Oligomer
ucaauucccagaaaagcccag

SEQ ID NO: 3802 - RNA, 21 nt, artificial
  siRNA Oligomer
agagucaaagauaacuguuag

SEQ ID NO: 3803 - RNA, 21 nt, artificial
  siRNA Oligomer
auccuauccagcuuuuuacau

SEQ ID NO: 3804 - RNA, 21 nt, artificial
  siRNA Oligomer
uucuccugaaaccagaggaga

SEQ ID NO: 3805 - RNA, 21 nt, artificial
  siRNA Oligomer
guauccaagguggaaaaaauc

SEQ ID NO: 3806 - RNA, 21 nt, artificial
  siRNA Oligomer
ugguuaucuggacggugaguu

SEQ ID NO: 3807 - RNA, 21 nt, artificial
  siRNA Oligomer
aucccaguagucaaaaucacu

SEQ ID NO: 3808 - RNA, 21 nt, artificial
  siRNA Oligomer
acuuuugcuuaccuauuccau

SEQ ID NO: 3809 - RNA, 21 nt, artificial
  siRNA Oligomer
cuuuugcuuaccuauuccauc

SEQ ID NO: 3810 - RNA, 21 nt, artificial
  siRNA Oligomer
cucuaggcuguacuauaaacc

SEQ ID NO: 3811 - RNA, 21 nt, artificial
  siRNA Oligomer
acgcuagaaucacacacaauc

SEQ ID NO: 3812 - RNA, 21 nt, artificial
  siRNA Oligomer
gaagcaguuccauuauugccg

SEQ ID NO: 3813 - RNA, 21 nt, artificial
  siRNA Oligomer
aaacacagugaaccuuuggag

SEQ ID NO: 3814 - RNA, 21 nt, artificial
  siRNA Oligomer
aaacacaggcagguggcuucu

SEQ ID NO: 3815 - RNA, 21 nt, artificial
  siRNA Oligomer
auacagcuacuacccuugaca

SEQ ID NO: 3816 - RNA, 21 nt, artificial
  siRNA Oligomer
guauucaucauucacucaaug

SEQ ID NO: 3817 - RNA, 21 nt, artificial
  siRNA Oligomer
aauagcuagggcaggaaaccu

SEQ ID NO: 3818 - RNA, 21 nt, artificial
  siRNA Oligomer
ucguugagguuggguucagga

SEQ ID NO: 3819 - RNA, 21 nt, artificial
  siRNA Oligomer
aaacucaaaugggcuucuacu

SEQ ID NO: 3820 - RNA, 21 nt, artificial
  siRNA Oligomer
ugaacauuguugaguggaggc

SEQ ID NO: 3821 - RNA, 21 nt, artificial
  siRNA Oligomer
acaguucuccagcauuuuaac

SEQ ID NO: 3822 - RNA, 21 nt, artificial
  siRNA Oligomer
auuuccuauccucacagguau

SEQ ID NO: 3823 - RNA, 21 nt, artificial
  siRNA Oligomer
caucccauucaauucuguaca

SEQ ID NO: 3824 - RNA, 21 nt, artificial
  siRNA Oligomer
cccagagaugagauaacacug

SEQ ID NO: 3825 - RNA, 21 nt, artificial
  siRNA Oligomer
aaagucccugaagcuagucca

SEQ ID NO: 3826 - RNA, 21 nt, artificial
  siRNA Oligomer
aacuaauuuccuauccucaca

SEQ ID NO: 3827 - RNA, 21 nt, artificial
  siRNA Oligomer
accacaagcuuuuguugccuc

SEQ ID NO: 3828 - RNA, 21 nt, artificial
  siRNA Oligomer
aucacuucuccaaaggccaga

SEQ ID NO: 3829 - RNA, 21 nt, artificial
  siRNA Oligomer
ucccagaaaagcccagagaug

SEQ ID NO: 3830 - RNA, 21 nt, artificial
  siRNA Oligomer
uggacggugaguuucauucuc

SEQ ID NO: 3831 - RNA, 21 nt, artificial
  siRNA Oligomer
uucucuaggcuguacuauaaa

SEQ ID NO: 3832 - RNA, 21 nt, artificial
  siRNA Oligomer
uggaaaaaggacaacaguucu

SEQ ID NO: 3833 - RNA, 21 nt, artificial
  siRNA Oligomer
uuugagcaaccaaguuuaguu

SEQ ID NO: 3834 - RNA, 21 nt, artificial
  siRNA Oligomer
acauuagagugaggaagucac

SEQ ID NO: 3835 - RNA, 21 nt, artificial
  siRNA Oligomer
aauggcaccacaagcuuuugu

SEQ ID NO: 3836 - RNA, 21 nt, artificial
  siRNA Oligomer
uugagcaauucucugggucag

SEQ ID NO: 3837 - RNA, 21 nt, artificial
  siRNA Oligomer
cuuaacaagucgaaauccuga

SEQ ID NO: 3838 - RNA, 21 nt, artificial
  siRNA Oligomer
ucauucacucaauggaagagu

SEQ ID NO: 3839 - RNA, 21 nt, artificial
  siRNA Oligomer
caaacuacaaaugacuuuagc

SEQ ID NO: 3840 - RNA, 21 nt, artificial
  siRNA Oligomer
accauaucuccauagccaaug

SEQ ID NO: 3841 - RNA, 21 nt, artificial
  siRNA Oligomer
aagcuaguccaugagcaguuc

SEQ ID NO: 3842 - RNA, 21 nt, artificial
  siRNA Oligomer
aaggaccuuugagcaaccaag

SEQ ID NO: 3843 - RNA, 21 nt, artificial
  siRNA Oligomer
uauucccuagugacagguauc

SEQ ID NO: 3844 - RNA, 21 nt, artificial
  siRNA Oligomer
uuucucagggacaaggaccuu

SEQ ID NO: 3845 - RNA, 21 nt, artificial
  siRNA Oligomer
guucuugcugcucaaacugcc

SEQ ID NO: 3846 - RNA, 21 nt, artificial
  siRNA Oligomer
aaucacuucuccaaaggccag

SEQ ID NO: 3847 - RNA, 21 nt, artificial
  siRNA Oligomer
uucaaucacuguuguuccaau

SEQ ID NO: 3848 - RNA, 21 nt, artificial
  siRNA Oligomer
uaacaccaggaugaauacauc

SEQ ID NO: 3849 - RNA, 21 nt, artificial
  siRNA Oligomer
aguugcaaccauggucaacgg

SEQ ID NO: 3850 - RNA, 21 nt, artificial
  siRNA Oligomer
aggcaaaucugguuuauauag

SEQ ID NO: 3851 - RNA, 21 nt, artificial
  siRNA Oligomer
aaaggacaacaguucuacauc

SEQ ID NO: 3852 - RNA, 23 nt, artificial
  siRNA Oligomer
gaguuuuacauuugauuccacaa

SEQ ID NO: 3853 - RNA, 23 nt, artificial
  siRNA Oligomer
gguaauagacuauauaaaccaga

SEQ ID NO: 3854 - RNA, 23 nt, artificial
  siRNA Oligomer
gggaauugaaguaucucuccuua

SEQ ID NO: 3855 - RNA, 23 nt, artificial
  siRNA Oligomer
gaaaauguauguaaaaagcugga

SEQ ID NO: 3856 - RNA, 23 nt, artificial
  siRNA Oligomer
cagaggauuuuuuaaaucacaga

SEQ ID NO: 3857 - RNA, 23 nt, artificial
  siRNA Oligomer
ggcuguuaaauuaauauuccugu

SEQ ID NO: 3858 - RNA, 23 nt, artificial
  siRNA Oligomer
gccuuauuuuuugucuuauucca

SEQ ID NO: 3859 - RNA, 23 nt, artificial
  siRNA Oligomer
caaauuugaaggguuuuuagaca

SEQ ID NO: 3860 - RNA, 23 nt, artificial
  siRNA Oligomer
cuaagugauuuugacuacuggga

SEQ ID NO: 3861 - RNA, 23 nt, artificial
  siRNA Oligomer
cuaucacccagagagccugcuaa

SEQ ID NO: 3862 - RNA, 23 nt, artificial
  siRNA Oligomer
agauguccugcggcuuuccucaa

SEQ ID NO: 3863 - RNA, 23 nt, artificial
  siRNA Oligomer
aacuauucagcuagucagcuaaa

SEQ ID NO: 3864 - RNA, 23 nt, artificial
  siRNA Oligomer
guuguuuugcaugucuauuguua

SEQ ID NO: 3865 - RNA, 23 nt, artificial
  siRNA Oligomer
ugaguuuuacauuugauuccaca

SEQ ID NO: 3866 - RNA, 23 nt, artificial
  siRNA Oligomer
gguaguaaaacuauucagcuagu

SEQ ID NO: 3867 - RNA, 23 nt, artificial
  siRNA Oligomer
aguauuacaugugcuuaaucuca

SEQ ID NO: 3868 - RNA, 23 nt, artificial
  siRNA Oligomer
cuguuaugcuuacaaaaugguga

SEQ ID NO: 3869 - RNA, 23 nt, artificial
  siRNA Oligomer
ucucuugccuguuaugcuuacaa

SEQ ID NO: 3870 - RNA, 23 nt, artificial
  siRNA Oligomer
ccauuucaccauggcaguguuau

SEQ ID NO: 3871 - RNA, 23 nt, artificial
  siRNA Oligomer
ugauccucagcucaggauuucga

SEQ ID NO: 3872 - RNA, 23 nt, artificial
  siRNA Oligomer
caaaauaguguagauuuucugca

SEQ ID NO: 3873 - RNA, 23 nt, artificial
  siRNA Oligomer
gguuaaaaugcuggagaacuguc

SEQ ID NO: 3874 - RNA, 23 nt, artificial
  siRNA Oligomer
cugauauuuuuguguguaguuga

SEQ ID NO: 3875 - RNA, 23 nt, artificial
  siRNA Oligomer
guaggugaguuuaauuaaagcuu

SEQ ID NO: 3876 - RNA, 23 nt, artificial
  siRNA Oligomer
acaaacuaaacucuucaaaugcu

SEQ ID NO: 3877 - RNA, 23 nt, artificial
  siRNA Oligomer
ccuacuuuugagcuuacacuugu

SEQ ID NO: 3878 - RNA, 23 nt, artificial
  siRNA Oligomer
gcccauuugaguuuuacauuuga

SEQ ID NO: 3879 - RNA, 23 nt, artificial
  siRNA Oligomer
gauuacucuuccauugagugaau

SEQ ID NO: 3880 - RNA, 23 nt, artificial
  siRNA Oligomer
uguuaugcuuacaaaauggugau

SEQ ID NO: 3881 - RNA, 23 nt, artificial
  siRNA Oligomer
aguugucaccacugacugggcaa

SEQ ID NO: 3882 - RNA, 23 nt, artificial
  siRNA Oligomer
cucaaauuugaaggguuuuuaga

SEQ ID NO: 3883 - RNA, 23 nt, artificial
  siRNA Oligomer
gcuucuccucugguuucaggaga

SEQ ID NO: 3884 - RNA, 23 nt, artificial
  siRNA Oligomer
gcaacugcagcuaacaggcugau

SEQ ID NO: 3885 - RNA, 23 nt, artificial
  siRNA Oligomer
gacagauguauucauccuggugu

SEQ ID NO: 3886 - RNA, 23 nt, artificial
  siRNA Oligomer
gaacugcucauggacuagcuuca

SEQ ID NO: 3887 - RNA, 23 nt, artificial
  siRNA Oligomer
uauuuagccuaucaaaacuucca

SEQ ID NO: 3888 - RNA, 23 nt, artificial
  siRNA Oligomer
cccauuugaguuuuacauuugau

SEQ ID NO: 3889 - RNA, 23 nt, artificial
  siRNA Oligomer
cuaagaagccaccugccuguguu

SEQ ID NO: 3890 - RNA, 23 nt, artificial
  siRNA Oligomer
cuaucaaaacuuccaaaagccca

SEQ ID NO: 3891 - RNA, 23 nt, artificial
  siRNA Oligomer
ugauuacucuuccauugagugaa

SEQ ID NO: 3892 - RNA, 23 nt, artificial
  siRNA Oligomer
uaauuaaagcuuaacccuaggua

SEQ ID NO: 3893 - RNA, 23 nt, artificial
  siRNA Oligomer
cccuagcuauuagcuccacuuca

SEQ ID NO: 3894 - RNA, 23 nt, artificial
  siRNA Oligomer
gggacagauguauucauccuggu

SEQ ID NO: 3895 - RNA, 23 nt, artificial
  siRNA Oligomer
ugaacccaaccucaacgagguaa

SEQ ID NO: 3896 - RNA, 23 nt, artificial
  siRNA Oligomer
agguaagcaaaaguagaagccca

SEQ ID NO: 3897 - RNA, 23 nt, artificial
  siRNA Oligomer
acaauuugguuucagguaggcuu

SEQ ID NO: 3898 - RNA, 23 nt, artificial
  siRNA Oligomer
gacucucuugccuguuaugcuua

SEQ ID NO: 3899 - RNA, 23 nt, artificial
  siRNA Oligomer
gucucuuuucuuucuguguuuca

SEQ ID NO: 3900 - RNA, 23 nt, artificial
  siRNA Oligomer
cucugauccucagcucaggauuu

SEQ ID NO: 3901 - RNA, 23 nt, artificial
  siRNA Oligomer
guuuaagcaggagaacugcucau

SEQ ID NO: 3902 - RNA, 23 nt, artificial
  siRNA Oligomer
gguaagcaaaaguagaagcccau

SEQ ID NO: 3903 - RNA, 23 nt, artificial
  siRNA Oligomer
gaacucugauccucagcucagga

SEQ ID NO: 3904 - RNA, 23 nt, artificial
  siRNA Oligomer
ucuguguuucacauucauagcaa

SEQ ID NO: 3905 - RNA, 23 nt, artificial
  siRNA Oligomer
uguuuugcaugucuauuguuaag

SEQ ID NO: 3906 - RNA, 23 nt, artificial
  siRNA Oligomer
ugaaaaacaggugugauccuguu

SEQ ID NO: 3907 - RNA, 23 nt, artificial
  siRNA Oligomer
ccuauuuugauuuucauauggcu

SEQ ID NO: 3908 - RNA, 23 nt, artificial
  siRNA Oligomer
cacuguucaaauuagccaguguu

SEQ ID NO: 3909 - RNA, 23 nt, artificial
  siRNA Oligomer
caaauguagucucuuuucuuucu

SEQ ID NO: 3910 - RNA, 23 nt, artificial
  siRNA Oligomer
cagauaaccaugcaugcacccag

SEQ ID NO: 3911 - RNA, 23 nt, artificial
  siRNA Oligomer
guugaauacugucuuuaaacuag

SEQ ID NO: 3912 - RNA, 23 nt, artificial
  siRNA Oligomer
gcaacaaaagcuuguggugccau

SEQ ID NO: 3913 - RNA, 23 nt, artificial
  siRNA Oligomer
gauaugguuuauaguacagccua

SEQ ID NO: 3914 - RNA, 23 nt, artificial
  siRNA Oligomer
gacuauauaaaccagauuugccu

SEQ ID NO: 3915 - RNA, 23 nt, artificial
  siRNA Oligomer
cuuauuccaacuaaguagaucau

SEQ ID NO: 3916 - RNA, 23 nt, artificial
  siRNA Oligomer
guauuacaugugcuuaaucucag

SEQ ID NO: 3917 - RNA, 23 nt, artificial
  siRNA Oligomer
aguaaaacuauucagcuagucag

SEQ ID NO: 3918 - RNA, 23 nt, artificial
  siRNA Oligomer
cucucuugccuguuaugcuuaca

SEQ ID NO: 3919 - RNA, 23 nt, artificial
  siRNA Oligomer
agauuauuucaugauuggguagu

SEQ ID NO: 3920 - RNA, 23 nt, artificial
  siRNA Oligomer
guuaaaaugcuggagaacugucu

SEQ ID NO: 3921 - RNA, 23 nt, artificial
  siRNA Oligomer
aaacuauucagcuagucagcuaa

SEQ ID NO: 3922 - RNA, 23 nt, artificial
  siRNA Oligomer
gaaaaacaggugugauccuguua

SEQ ID NO: 3923 - RNA, 23 nt, artificial
  siRNA Oligomer
gcuucacuguuucuuggugacuu

SEQ ID NO: 3924 - RNA, 23 nt, artificial
  siRNA Oligomer
agaacccggccagcauuucagaa

SEQ ID NO: 3925 - RNA, 23 nt, artificial
  siRNA Oligomer
uagccuccacucaacaauguuca

SEQ ID NO: 3926 - RNA, 23 nt, artificial
  siRNA Oligomer
ugaacugauauuuuuguguguag

SEQ ID NO: 3927 - RNA, 23 nt, artificial
  siRNA Oligomer
aguaaucuauccucuuuucagua

SEQ ID NO: 3928 - RNA, 23 nt, artificial
  siRNA Oligomer
ggugaguuuaauuaaagcuuaac

SEQ ID NO: 3929 - RNA, 23 nt, artificial
  siRNA Oligomer
uguucaauucagcaaggcuuuca

SEQ ID NO: 3930 - RNA, 23 nt, artificial
  siRNA Oligomer
guaaucuauccucuuuucaguau

SEQ ID NO: 3931 - RNA, 23 nt, artificial
  siRNA Oligomer
ucuuucuguguuucacauucaua

SEQ ID NO: 3932 - RNA, 23 nt, artificial
  siRNA Oligomer
aguaggugaguuuaauuaaagcu

SEQ ID NO: 3933 - RNA, 23 nt, artificial
  siRNA Oligomer
gaaauuaguucugagaucuaguc

SEQ ID NO: 3934 - RNA, 23 nt, artificial
  siRNA Oligomer
ucacuagggaauaauaaaggccu

SEQ ID NO: 3935 - RNA, 23 nt, artificial
  siRNA Oligomer
aaacucaccguccagauaaccau

SEQ ID NO: 3936 - RNA, 23 nt, artificial
  siRNA Oligomer
acuguuucuuggugacuuccuca

SEQ ID NO: 3937 - RNA, 23 nt, artificial
  siRNA Oligomer
guguuaucucaucucugggcuuu

SEQ ID NO: 3938 - RNA, 23 nt, artificial
  siRNA Oligomer
acuauaagugaccuaaaauguca

SEQ ID NO: 3939 - RNA, 23 nt, artificial
  siRNA Oligomer
uuagcuccacuucacaugcugga

SEQ ID NO: 3940 - RNA, 23 nt, artificial
  siRNA Oligomer
aaugucacuguucaaauuagcca

SEQ ID NO: 3941 - RNA, 23 nt, artificial
  siRNA Oligomer
ugggaauugaaguaucucuccuu

SEQ ID NO: 3942 - RNA, 23 nt, artificial
  siRNA Oligomer
aaaacuauucagcuagucagcua

SEQ ID NO: 3943 - RNA, 23 nt, artificial
  siRNA Oligomer
ccacucaacaauguucaauucag

SEQ ID NO: 3944 - RNA, 23 nt, artificial
  siRNA Oligomer
cauauggcuuuuuuuucucuaag

SEQ ID NO: 3945 - RNA, 23 nt, artificial
  siRNA Oligomer
aagcuuaacccuagguaagagua

SEQ ID NO: 3946 - RNA, 23 nt, artificial
  siRNA Oligomer
gaauugcuggacuguggcuauca

SEQ ID NO: 3947 - RNA, 23 nt, artificial
  siRNA Oligomer
gcuaagugauuuugacuacuggg

SEQ ID NO: 3948 - RNA, 23 nt, artificial
  siRNA Oligomer
aaaacaggugugauccuguuacu

SEQ ID NO: 3949 - RNA, 23 nt, artificial
  siRNA Oligomer
ugcucaagauguccugcggcuuu

SEQ ID NO: 3950 - RNA, 23 nt, artificial
  siRNA Oligomer
guguuacugaaaaacagguguga

SEQ ID NO: 3951 - RNA, 23 nt, artificial
  siRNA Oligomer
aacucugauccucagcucaggau

SEQ ID NO: 3952 - RNA, 23 nt, artificial
  siRNA Oligomer
acagauguauucauccugguguu

SEQ ID NO: 3953 - RNA, 23 nt, artificial
  siRNA Oligomer
uguuuaagcaggagaacugcuca

SEQ ID NO: 3954 - RNA, 23 nt, artificial
  siRNA Oligomer
acugcuucacuguuucuugguga

SEQ ID NO: 3955 - RNA, 23 nt, artificial
  siRNA Oligomer
aagaagccaccugccuguguuua

SEQ ID NO: 3956 - RNA, 23 nt, artificial
  siRNA Oligomer
ccacuuugaauuauugaaacggg

SEQ ID NO: 3957 - RNA, 23 nt, artificial
  siRNA Oligomer
ucaagauguccugcggcuuuccu

SEQ ID NO: 3958 - RNA, 23 nt, artificial
  siRNA Oligomer
gagauaugguuuauaguacagcc

SEQ ID NO: 3959 - RNA, 23 nt, artificial
  siRNA Oligomer
uacacuuguguuuaagcaggaga

SEQ ID NO: 3960 - RNA, 23 nt, artificial
  siRNA Oligomer
gauucacuuaguaaucuauccuc

SEQ ID NO: 3961 - RNA, 23 nt, artificial
  siRNA Oligomer
ggugccauuucaguaaccacggu

SEQ ID NO: 3962 - RNA, 23 nt, artificial
  siRNA Oligomer
aaucaauguuguuuugcaugucu

SEQ ID NO: 3963 - RNA, 23 nt, artificial
  siRNA Oligomer
aauaauggaacugcuucacuguu

SEQ ID NO: 3964 - RNA, 23 nt, artificial
  siRNA Oligomer
uauccuugcugugggucguggau

SEQ ID NO: 3965 - RNA, 23 nt, artificial
  siRNA Oligomer
gauuccacaauuugguuucaggu

SEQ ID NO: 3966 - RNA, 23 nt, artificial
  siRNA Oligomer
uaguaaaacuauucagcuaguca

SEQ ID NO: 3967 - RNA, 23 nt, artificial
  siRNA Oligomer
acauuugauuccacaauuugguu

SEQ ID NO: 3968 - RNA, 23 nt, artificial
  siRNA Oligomer
caaggcuuucauauccuugcugu

SEQ ID NO: 3969 - RNA, 23 nt, artificial
  siRNA Oligomer
gaagugauucaaaauaguguaga

SEQ ID NO: 3970 - RNA, 23 nt, artificial
  siRNA Oligomer
uguguuucacauucauagcaacu

SEQ ID NO: 3971 - RNA, 23 nt, artificial
  siRNA Oligomer
guuucacauucauagcaacugca

SEQ ID NO: 3972 - RNA, 23 nt, artificial
  siRNA Oligomer
cucaucucugggcuuuucuggga

SEQ ID NO: 3973 - RNA, 23 nt, artificial
  siRNA Oligomer
ucuuauuccaacuaaguagauca

SEQ ID NO: 3974 - RNA, 23 nt, artificial
  siRNA Oligomer
guuuaauuaaagcuuaacccuag

SEQ ID NO: 3975 - RNA, 23 nt, artificial
  siRNA Oligomer
acauucauagcaacugcagcuaa

SEQ ID NO: 3976 - RNA, 23 nt, artificial
  siRNA Oligomer
uugauuacucuuccauugaguga

SEQ ID NO: 3977 - RNA, 23 nt, artificial
  siRNA Oligomer
gcuugcgagguuguguuaugcac

SEQ ID NO: 3978 - RNA, 23 nt, artificial
  siRNA Oligomer
agaagccaccugccuguguuuac

SEQ ID NO: 3979 - RNA, 23 nt, artificial
  siRNA Oligomer
aauguagucucuuuucuuucugu

SEQ ID NO: 3980 - RNA, 23 nt, artificial
  siRNA Oligomer
uaagaagccaccugccuguguuu

SEQ ID NO: 3981 - RNA, 23 nt, artificial
  siRNA Oligomer
agaacugcucauggacuagcuuc

SEQ ID NO: 3982 - RNA, 23 nt, artificial
  siRNA Oligomer
cuauauaaaccagauuugccuau

SEQ ID NO: 3983 - RNA, 23 nt, artificial
  siRNA Oligomer
ugguaauagacuauauaaaccag

SEQ ID NO: 3984 - RNA, 23 nt, artificial
  siRNA Oligomer
gccaagauaaaucaauguuguuu

SEQ ID NO: 3985 - RNA, 23 nt, artificial
  siRNA Oligomer
ucagaggauuuuuuaaaucacag

SEQ ID NO: 3986 - RNA, 23 nt, artificial
  siRNA Oligomer
gauauuuagccuaucaaaacuuc

SEQ ID NO: 3987 - RNA, 23 nt, artificial
  siRNA Oligomer
gagaacucugauccucagcucag

SEQ ID NO: 3988 - RNA, 23 nt, artificial
  siRNA Oligomer
cacuguuucuuggugacuuccuc

SEQ ID NO: 3989 - RNA, 23 nt, artificial
  siRNA Oligomer
aguaaaugagaaauauuacggca

SEQ ID NO: 3990 - RNA, 23 nt, artificial
  siRNA Oligomer
acuauauaaaccagauuugccua

SEQ ID NO: 3991 - RNA, 23 nt, artificial
  siRNA Oligomer
caauuugguuucagguaggcuug

SEQ ID NO: 3992 - RNA, 23 nt, artificial
  siRNA Oligomer
caaagguucacuguguuucugcc

SEQ ID NO: 3993 - RNA, 23 nt, artificial
  siRNA Oligomer
cauuucaccauggcaguguuauc

SEQ ID NO: 3994 - RNA, 23 nt, artificial
  siRNA Oligomer
aaaaacuuuacucacugauugga

SEQ ID NO: 3995 - RNA, 23 nt, artificial
  siRNA Oligomer
uguagucucuuuucuuucugugu

SEQ ID NO: 3996 - RNA, 23 nt, artificial
  siRNA Oligomer
gguguuacugaaaaacaggugug

SEQ ID NO: 3997 - RNA, 23 nt, artificial
  siRNA Oligomer
cuguucuuaaguguugaauacug

SEQ ID NO: 3998 - RNA, 23 nt, artificial
  siRNA Oligomer
gaaaaaacuuuacucacugauug

SEQ ID NO: 3999 - RNA, 23 nt, artificial
  siRNA Oligomer
gaacugauauuuuuguguguagu

SEQ ID NO: 4000 - RNA, 23 nt, artificial
  siRNA Oligomer
caucgauguagaacuguuguccu

SEQ ID NO: 4001 - RNA, 23 nt, artificial
  siRNA Oligomer
cuugguugcucaaagguccuugu

SEQ ID NO: 4002 - RNA, 23 nt, artificial
  siRNA Oligomer
caacuaaguagaucauuaucucu

SEQ ID NO: 4003 - RNA, 23 nt, artificial
  siRNA Oligomer
uaaaaugcuggagaacugucugu

SEQ ID NO: 4004 - RNA, 23 nt, artificial
  siRNA Oligomer
gauaaggagcuuauucagguuuc

SEQ ID NO: 4005 - RNA, 23 nt, artificial
  siRNA Oligomer
aaacagagccguugaccaugguu

SEQ ID NO: 4006 - RNA, 23 nt, artificial
  siRNA Oligomer
cugcuaagugauuuugacuacug

SEQ ID NO: 4007 - RNA, 23 nt, artificial
  siRNA Oligomer
ccucacucuaauguuuuaaagag

SEQ ID NO: 4008 - RNA, 23 nt, artificial
  siRNA Oligomer
uuuugagcuuacacuuguguuua

SEQ ID NO: 4009 - RNA, 23 nt, artificial
  siRNA Oligomer
cugaaaaacaggugugauccugu

SEQ ID NO: 4010 - RNA, 23 nt, artificial
  siRNA Oligomer
ugcuuacaaaauggugauggcuu

SEQ ID NO: 4011 - RNA, 23 nt, artificial
  siRNA Oligomer
gugaguuuaauuaaagcuuaacc

SEQ ID NO: 4012 - RNA, 23 nt, artificial
  siRNA Oligomer
gugauggcuuauggaaggcuguu

SEQ ID NO: 4013 - RNA, 23 nt, artificial
  siRNA Oligomer
cacuuugaauuauugaaacgggu

SEQ ID NO: 4014 - RNA, 23 nt, artificial
  siRNA Oligomer
guucacuguguuucugccgcugu

SEQ ID NO: 4015 - RNA, 23 nt, artificial
  siRNA Oligomer
aagaacccggccagcauuucaga

SEQ ID NO: 4016 - RNA, 23 nt, artificial
  siRNA Oligomer
uacucuuccauugagugaaugau

SEQ ID NO: 4017 - RNA, 23 nt, artificial
  siRNA Oligomer
cuugucccugagaaacugaccca

SEQ ID NO: 4018 - RNA, 23 nt, artificial
  siRNA Oligomer
aagauguccugcggcuuuccuca

SEQ ID NO: 4019 - RNA, 23 nt, artificial
  siRNA Oligomer
uagucucuuuucuuucuguguuu

SEQ ID NO: 4020 - RNA, 23 nt, artificial
  siRNA Oligomer
guguugaauacugucuuuaaacu

SEQ ID NO: 4021 - RNA, 23 nt, artificial
  siRNA Oligomer
agcaacugcagcuaacaggcuga

SEQ ID NO: 4022 - RNA, 23 nt, artificial
  siRNA Oligomer
ugaaaauguauguaaaaagcugg

SEQ ID NO: 4023 - RNA, 23 nt, artificial
  siRNA Oligomer
cucuuuucuuucuguguuucaca

SEQ ID NO: 4024 - RNA, 23 nt, artificial
  siRNA Oligomer
ugcccuagcuauuagcuccacuu

SEQ ID NO: 4025 - RNA, 23 nt, artificial
  siRNA Oligomer
agcaaacuaaacuugguugcuca

SEQ ID NO: 4026 - RNA, 23 nt, artificial
  siRNA Oligomer
cuauucagcuagucagcuaaagu

SEQ ID NO: 4027 - RNA, 23 nt, artificial
  siRNA Oligomer
uagaggucgcuucuccucugguu

SEQ ID NO: 4028 - RNA, 23 nt, artificial
  siRNA Oligomer
aaaagcccacaccaccaguuccu

SEQ ID NO: 4029 - RNA, 23 nt, artificial
  siRNA Oligomer
guccuugucccugagaaacugac

SEQ ID NO: 4030 - RNA, 23 nt, artificial
  siRNA Oligomer
gaacugcuucacuguuucuuggu

SEQ ID NO: 4031 - RNA, 23 nt, artificial
  siRNA Oligomer
aacagagccguugaccaugguug

SEQ ID NO: 4032 - RNA, 23 nt, artificial
  siRNA Oligomer
uguguaguugauuacucuuccau

SEQ ID NO: 4033 - RNA, 23 nt, artificial
  siRNA Oligomer
cugaacccaaccucaacgaggua

SEQ ID NO: 4034 - RNA, 23 nt, artificial
  siRNA Oligomer
uuucugggaauugaaguaucucu

SEQ ID NO: 4035 - RNA, 23 nt, artificial
  siRNA Oligomer
gcuuucauauccuugcugugggu

SEQ ID NO: 4036 - RNA, 23 nt, artificial
  siRNA Oligomer
ucugauucacuuaguaaucuauc

SEQ ID NO: 4037 - RNA, 23 nt, artificial
  siRNA Oligomer
cauuucaguaaccacgguguugu

SEQ ID NO: 4038 - RNA, 23 nt, artificial
  siRNA Oligomer
aauguucaauucagcaaggcuuu

SEQ ID NO: 4039 - RNA, 23 nt, artificial
  siRNA Oligomer
agcuccacuucacaugcuggaga

SEQ ID NO: 4040 - RNA, 23 nt, artificial
  siRNA Oligomer
aaacugacccagagaauugcuca

SEQ ID NO: 4041 - RNA, 23 nt, artificial
  siRNA Oligomer
cuuacacuuguguuuaagcagga

SEQ ID NO: 4042 - RNA, 23 nt, artificial
  siRNA Oligomer
uaagcuccaaagguucacugugu

SEQ ID NO: 4043 - RNA, 23 nt, artificial
  siRNA Oligomer
acuuuugagcuuacacuuguguu

SEQ ID NO: 4044 - RNA, 23 nt, artificial
  siRNA Oligomer
uguuacugaaaaacaggugugau

SEQ ID NO: 4045 - RNA, 23 nt, artificial
  siRNA Oligomer
uuuuuuccaccuuggauaccugu

SEQ ID NO: 4046 - RNA, 23 nt, artificial
  siRNA Oligomer
uuacucuuccauugagugaauga

SEQ ID NO: 4047 - RNA, 23 nt, artificial
  siRNA Oligomer
uuguggaaucaaauguaaaacuc

SEQ ID NO: 4048 - RNA, 23 nt, artificial
  siRNA Oligomer
ucugguuuauauagucuauuacc

SEQ ID NO: 4049 - RNA, 23 nt, artificial
  siRNA Oligomer
uaaggagagauacuucaauuccc

SEQ ID NO: 4050 - RNA, 23 nt, artificial
  siRNA Oligomer
uccagcuuuuuacauacauuuuc

SEQ ID NO: 4051 - RNA, 23 nt, artificial
  siRNA Oligomer
ucugugauuuaaaaaauccucug

SEQ ID NO: 4052 - RNA, 23 nt, artificial
  siRNA Oligomer
acaggaauauuaauuuaacagcc

SEQ ID NO: 4053 - RNA, 23 nt, artificial
  siRNA Oligomer
uggaauaagacaaaaaauaaggc

SEQ ID NO: 4054 - RNA, 23 nt, artificial
  siRNA Oligomer
ugucuaaaaacccuucaaauuug

SEQ ID NO: 4055 - RNA, 23 nt, artificial
  siRNA Oligomer
ucccaguagucaaaaucacuuag

SEQ ID NO: 4056 - RNA, 23 nt, artificial
  siRNA Oligomer
uuagcaggcucucugggugauag

SEQ ID NO: 4057 - RNA, 23 nt, artificial
  siRNA Oligomer
uugaggaaagccgcaggacaucu

SEQ ID NO: 4058 - RNA, 23 nt, artificial
  siRNA Oligomer
uuuagcugacuagcugaauaguu

SEQ ID NO: 4059 - RNA, 23 nt, artificial
  siRNA Oligomer
uaacaauagacaugcaaaacaac

SEQ ID NO: 4060 - RNA, 23 nt, artificial
  siRNA Oligomer
uguggaaucaaauguaaaacuca

SEQ ID NO: 4061 - RNA, 23 nt, artificial
  siRNA Oligomer
acuagcugaauaguuuuacuacc

SEQ ID NO: 4062 - RNA, 23 nt, artificial
  siRNA Oligomer
ugagauuaagcacauguaauacu

SEQ ID NO: 4063 - RNA, 23 nt, artificial
  siRNA Oligomer
ucaccauuuuguaagcauaacag

SEQ ID NO: 4064 - RNA, 23 nt, artificial
  siRNA Oligomer
uuguaagcauaacaggcaagaga

SEQ ID NO: 4065 - RNA, 23 nt, artificial
  siRNA Oligomer
auaacacugccauggugaaaugg

SEQ ID NO: 4066 - RNA, 23 nt, artificial
  siRNA Oligomer
ucgaaauccugagcugaggauca

SEQ ID NO: 4067 - RNA, 23 nt, artificial
  siRNA Oligomer
ugcagaaaaucuacacuauuuug

SEQ ID NO: 4068 - RNA, 23 nt, artificial
  siRNA Oligomer
gacaguucuccagcauuuuaacc

SEQ ID NO: 4069 - RNA, 23 nt, artificial
  siRNA Oligomer
ucaacuacacacaaaaauaucag

SEQ ID NO: 4070 - RNA, 23 nt, artificial
  siRNA Oligomer
aagcuuuaauuaaacucaccuac

SEQ ID NO: 4071 - RNA, 23 nt, artificial
  siRNA Oligomer
agcauuugaagaguuuaguuugu

SEQ ID NO: 4072 - RNA, 23 nt, artificial
  siRNA Oligomer
acaaguguaagcucaaaaguagg

SEQ ID NO: 4073 - RNA, 23 nt, artificial
  siRNA Oligomer
ucaaauguaaaacucaaaugggc

SEQ ID NO: 4074 - RNA, 23 nt, artificial
  siRNA Oligomer
auucacucaauggaagaguaauc

SEQ ID NO: 4075 - RNA, 23 nt, artificial
  siRNA Oligomer
aucaccauuuuguaagcauaaca

SEQ ID NO: 4076 - RNA, 23 nt, artificial
  siRNA Oligomer
uugcccagucaguggugacaacu

SEQ ID NO: 4077 - RNA, 23 nt, artificial
  siRNA Oligomer
ucuaaaaacccuucaaauuugag

SEQ ID NO: 4078 - RNA, 23 nt, artificial
  siRNA Oligomer
ucuccugaaaccagaggagaagc

SEQ ID NO: 4079 - RNA, 23 nt, artificial
  siRNA Oligomer
aucagccuguuagcugcaguugc

SEQ ID NO: 4080 - RNA, 23 nt, artificial
  siRNA Oligomer
acaccaggaugaauacaucuguc

SEQ ID NO: 4081 - RNA, 23 nt, artificial
  siRNA Oligomer
ugaagcuaguccaugagcaguuc

SEQ ID NO: 4082 - RNA, 23 nt, artificial
  siRNA Oligomer
uggaaguuuugauaggcuaaaua

SEQ ID NO: 4083 - RNA, 23 nt, artificial
  siRNA Oligomer
aucaaauguaaaacucaaauggg

SEQ ID NO: 4084 - RNA, 23 nt, artificial
  siRNA Oligomer
aacacaggcagguggcuucuuag

SEQ ID NO: 4085 - RNA, 23 nt, artificial
  siRNA Oligomer
ugggcuuuuggaaguuuugauag

SEQ ID NO: 4086 - RNA, 23 nt, artificial
  siRNA Oligomer
uucacucaauggaagaguaauca

SEQ ID NO: 4087 - RNA, 23 nt, artificial
  siRNA Oligomer
uaccuaggguuaagcuuuaauua

SEQ ID NO: 4088 - RNA, 23 nt, artificial
  siRNA Oligomer
ugaaguggagcuaauagcuaggg

SEQ ID NO: 4089 - RNA, 23 nt, artificial
  siRNA Oligomer
accaggaugaauacaucuguccc

SEQ ID NO: 4090 - RNA, 23 nt, artificial
  siRNA Oligomer
uuaccucguugagguuggguuca

SEQ ID NO: 4091 - RNA, 23 nt, artificial
  siRNA Oligomer
ugggcuucuacuuuugcuuaccu

SEQ ID NO: 4092 - RNA, 23 nt, artificial
  siRNA Oligomer
aagccuaccugaaaccaaauugu

SEQ ID NO: 4093 - RNA, 23 nt, artificial
  siRNA Oligomer
uaagcauaacaggcaagagaguc

SEQ ID NO: 4094 - RNA, 23 nt, artificial
  siRNA Oligomer
ugaaacacagaaagaaaagagac

SEQ ID NO: 4095 - RNA, 23 nt, artificial
  siRNA Oligomer
aaauccugagcugaggaucagag

SEQ ID NO: 4096 - RNA, 23 nt, artificial
  siRNA Oligomer
augagcaguucuccugcuuaaac

SEQ ID NO: 4097 - RNA, 23 nt, artificial
  siRNA Oligomer
augggcuucuacuuuugcuuacc

SEQ ID NO: 4098 - RNA, 23 nt, artificial
  siRNA Oligomer
uccugagcugaggaucagaguuc

SEQ ID NO: 4099 - RNA, 23 nt, artificial
  siRNA Oligomer
uugcuaugaaugugaaacacaga

SEQ ID NO: 4100 - RNA, 23 nt, artificial
  siRNA Oligomer
cuuaacaauagacaugcaaaaca

SEQ ID NO: 4101 - RNA, 23 nt, artificial
  siRNA Oligomer
aacaggaucacaccuguuuuuca

SEQ ID NO: 4102 - RNA, 23 nt, artificial
  siRNA Oligomer
agccauaugaaaaucaaaauagg

SEQ ID NO: 4103 - RNA, 23 nt, artificial
  siRNA Oligomer
aacacuggcuaauuugaacagug

SEQ ID NO: 4104 - RNA, 23 nt, artificial
  siRNA Oligomer
agaaagaaaagagacuacauuug

SEQ ID NO: 4105 - RNA, 23 nt, artificial
  siRNA Oligomer
cugggugcaugcaugguuaucug

SEQ ID NO: 4106 - RNA, 23 nt, artificial
  siRNA Oligomer
cuaguuuaaagacaguauucaac

SEQ ID NO: 4107 - RNA, 23 nt, artificial
  siRNA Oligomer
auggcaccacaagcuuuuguugc

SEQ ID NO: 4108 - RNA, 23 nt, artificial
  siRNA Oligomer
uaggcuguacuauaaaccauauc

SEQ ID NO: 4109 - RNA, 23 nt, artificial
  siRNA Oligomer
aggcaaaucugguuuauauaguc

SEQ ID NO: 4110 - RNA, 23 nt, artificial
  siRNA Oligomer
augaucuacuuaguuggaauaag

SEQ ID NO: 4111 - RNA, 23 nt, artificial
  siRNA Oligomer
cugagauuaagcacauguaauac

SEQ ID NO: 4112 - RNA, 23 nt, artificial
  siRNA Oligomer
cugacuagcugaauaguuuuacu

SEQ ID NO: 4113 - RNA, 23 nt, artificial
  siRNA Oligomer
uguaagcauaacaggcaagagag

SEQ ID NO: 4114 - RNA, 23 nt, artificial
  siRNA Oligomer
acuacccaaucaugaaauaaucu

SEQ ID NO: 4115 - RNA, 23 nt, artificial
  siRNA Oligomer
agacaguucuccagcauuuuaac

SEQ ID NO: 4116 - RNA, 23 nt, artificial
  siRNA Oligomer
uuagcugacuagcugaauaguuu

SEQ ID NO: 4117 - RNA, 23 nt, artificial
  siRNA Oligomer
uaacaggaucacaccuguuuuuc

SEQ ID NO: 4118 - RNA, 23 nt, artificial
  siRNA Oligomer
aagucaccaagaaacagugaagc

SEQ ID NO: 4119 - RNA, 23 nt, artificial
  siRNA Oligomer
uucugaaaugcuggccggguucu

SEQ ID NO: 4120 - RNA, 23 nt, artificial
  siRNA Oligomer
ugaacauuguugaguggaggcua

SEQ ID NO: 4121 - RNA, 23 nt, artificial
  siRNA Oligomer
cuacacacaaaaauaucaguuca

SEQ ID NO: 4122 - RNA, 23 nt, artificial
  siRNA Oligomer
uacugaaaagaggauagauuacu

SEQ ID NO: 4123 - RNA, 23 nt, artificial
  siRNA Oligomer
guuaagcuuuaauuaaacucacc

SEQ ID NO: 4124 - RNA, 23 nt, artificial
  siRNA Oligomer
ugaaagccuugcugaauugaaca

SEQ ID NO: 4125 - RNA, 23 nt, artificial
  siRNA Oligomer
auacugaaaagaggauagauuac

SEQ ID NO: 4126 - RNA, 23 nt, artificial
  siRNA Oligomer
uaugaaugugaaacacagaaaga

SEQ ID NO: 4127 - RNA, 23 nt, artificial
  siRNA Oligomer
agcuuuaauuaaacucaccuacu

SEQ ID NO: 4128 - RNA, 23 nt, artificial
  siRNA Oligomer
gacuagaucucagaacuaauuuc

SEQ ID NO: 4129 - RNA, 23 nt, artificial
  siRNA Oligomer
aggccuuuauuauucccuaguga

SEQ ID NO: 4130 - RNA, 23 nt, artificial
  siRNA Oligomer
augguuaucuggacggugaguuu

SEQ ID NO: 4131 - RNA, 23 nt, artificial
  siRNA Oligomer
ugaggaagucaccaagaaacagu

SEQ ID NO: 4132 - RNA, 23 nt, artificial
  siRNA Oligomer
aaagcccagagaugagauaacac

SEQ ID NO: 4133 - RNA, 23 nt, artificial
  siRNA Oligomer
ugacauuuuaggucacuuauagu

SEQ ID NO: 4134 - RNA, 23 nt, artificial
  siRNA Oligomer
uccagcaugugaaguggagcuaa

SEQ ID NO: 4135 - RNA, 23 nt, artificial
  siRNA Oligomer
uggcuaauuugaacagugacauu

SEQ ID NO: 4136 - RNA, 23 nt, artificial
  siRNA Oligomer
aaggagagauacuucaauuccca

SEQ ID NO: 4137 - RNA, 23 nt, artificial
  siRNA Oligomer
uagcugacuagcugaauaguuuu

SEQ ID NO: 4138 - RNA, 23 nt, artificial
  siRNA Oligomer
cugaauugaacauuguugagugg

SEQ ID NO: 4139 - RNA, 23 nt, artificial
  siRNA Oligomer
cuuagagaaaaaaaagccauaug

SEQ ID NO: 4140 - RNA, 23 nt, artificial
  siRNA Oligomer
uacucuuaccuaggguuaagcuu

SEQ ID NO: 4141 - RNA, 23 nt, artificial
  siRNA Oligomer
ugauagccacaguccagcaauuc

SEQ ID NO: 4142 - RNA, 23 nt, artificial
  siRNA Oligomer
cccaguagucaaaaucacuuagc

SEQ ID NO: 4143 - RNA, 23 nt, artificial
  siRNA Oligomer
aguaacaggaucacaccuguuuu

SEQ ID NO: 4144 - RNA, 23 nt, artificial
  siRNA Oligomer
aaagccgcaggacaucuugagca

SEQ ID NO: 4145 - RNA, 23 nt, artificial
  siRNA Oligomer
ucacaccuguuuuucaguaacac

SEQ ID NO: 4146 - RNA, 23 nt, artificial
  siRNA Oligomer
auccugagcugaggaucagaguu

SEQ ID NO: 4147 - RNA, 23 nt, artificial
  siRNA Oligomer
aacaccaggaugaauacaucugu

SEQ ID NO: 4148 - RNA, 23 nt, artificial
  siRNA Oligomer
ugagcaguucuccugcuuaaaca

SEQ ID NO: 4149 - RNA, 23 nt, artificial
  siRNA Oligomer
ucaccaagaaacagugaagcagu

SEQ ID NO: 4150 - RNA, 23 nt, artificial
  siRNA Oligomer
uaaacacaggcagguggcuucuu

SEQ ID NO: 4151 - RNA, 23 nt, artificial
  siRNA Oligomer
cccguuucaauaauucaaagugg

SEQ ID NO: 4152 - RNA, 23 nt, artificial
  siRNA Oligomer
aggaaagccgcaggacaucuuga

SEQ ID NO: 4153 - RNA, 23 nt, artificial
  siRNA Oligomer
ggcuguacuauaaaccauaucuc

SEQ ID NO: 4154 - RNA, 23 nt, artificial
  siRNA Oligomer
ucuccugcuuaaacacaagugua

SEQ ID NO: 4155 - RNA, 23 nt, artificial
  siRNA Oligomer
gaggauagauuacuaagugaauc

SEQ ID NO: 4156 - RNA, 23 nt, artificial
  siRNA Oligomer
accgugguuacugaaauggcacc

SEQ ID NO: 4157 - RNA, 23 nt, artificial
  siRNA Oligomer
agacaugcaaaacaacauugauu

SEQ ID NO: 4158 - RNA, 23 nt, artificial
  siRNA Oligomer
aacagugaagcaguuccauuauu

SEQ ID NO: 4159 - RNA, 23 nt, artificial
  siRNA Oligomer
auccacgacccacagcaaggaua

SEQ ID NO: 4160 - RNA, 23 nt, artificial
  siRNA Oligomer
accugaaaccaaauuguggaauc

SEQ ID NO: 4161 - RNA, 23 nt, artificial
  siRNA Oligomer
ugacuagcugaauaguuuuacua

SEQ ID NO: 4162 - RNA, 23 nt, artificial
  siRNA Oligomer
aaccaaauuguggaaucaaaugu

SEQ ID NO: 4163 - RNA, 23 nt, artificial
  siRNA Oligomer
acagcaaggauaugaaagccuug

SEQ ID NO: 4164 - RNA, 23 nt, artificial
  siRNA Oligomer
ucuacacuauuuugaaucacuuc

SEQ ID NO: 4165 - RNA, 23 nt, artificial
  siRNA Oligomer
aguugcuaugaaugugaaacaca

SEQ ID NO: 4166 - RNA, 23 nt, artificial
  siRNA Oligomer
ugcaguugcuaugaaugugaaac

SEQ ID NO: 4167 - RNA, 23 nt, artificial
  siRNA Oligomer
ucccagaaaagcccagagaugag

SEQ ID NO: 4168 - RNA, 23 nt, artificial
  siRNA Oligomer
ugaucuacuuaguuggaauaaga

SEQ ID NO: 4169 - RNA, 23 nt, artificial
  siRNA Oligomer
cuaggguuaagcuuuaauuaaac

SEQ ID NO: 4170 - RNA, 23 nt, artificial
  siRNA Oligomer
uuagcugcaguugcuaugaaugu

SEQ ID NO: 4171 - RNA, 23 nt, artificial
  siRNA Oligomer
ucacucaauggaagaguaaucaa

SEQ ID NO: 4172 - RNA, 23 nt, artificial
  siRNA Oligomer
gugcauaacacaaccucgcaagc

SEQ ID NO: 4173 - RNA, 23 nt, artificial
  siRNA Oligomer
guaaacacaggcagguggcuucu

SEQ ID NO: 4174 - RNA, 23 nt, artificial
  siRNA Oligomer
acagaaagaaaagagacuacauu

SEQ ID NO: 4175 - RNA, 23 nt, artificial
  siRNA Oligomer
aaacacaggcagguggcuucuua

SEQ ID NO: 4176 - RNA, 23 nt, artificial
  siRNA Oligomer
gaagcuaguccaugagcaguucu

SEQ ID NO: 4177 - RNA, 23 nt, artificial
  siRNA Oligomer
auaggcaaaucugguuuauauag

SEQ ID NO: 4178 - RNA, 23 nt, artificial
  siRNA Oligomer
cugguuuauauagucuauuacca

SEQ ID NO: 4179 - RNA, 23 nt, artificial
  siRNA Oligomer
aaacaacauugauuuaucuuggc

SEQ ID NO: 4180 - RNA, 23 nt, artificial
  siRNA Oligomer
cugugauuuaaaaaauccucuga

SEQ ID NO: 4181 - RNA, 23 nt, artificial
  siRNA Oligomer
gaaguuuugauaggcuaaauauc

SEQ ID NO: 4182 - RNA, 23 nt, artificial
  siRNA Oligomer
cugagcugaggaucagaguucuc

SEQ ID NO: 4183 - RNA, 23 nt, artificial
  siRNA Oligomer
gaggaagucaccaagaaacagug

SEQ ID NO: 4184 - RNA, 23 nt, artificial
  siRNA Oligomer
ugccguaauauuucucauuuacu

SEQ ID NO: 4185 - RNA, 23 nt, artificial
  siRNA Oligomer
uaggcaaaucugguuuauauagu

SEQ ID NO: 4186 - RNA, 23 nt, artificial
  siRNA Oligomer
caagccuaccugaaaccaaauug

SEQ ID NO: 4187 - RNA, 23 nt, artificial
  siRNA Oligomer
ggcagaaacacagugaaccuuug

SEQ ID NO: 4188 - RNA, 23 nt, artificial
  siRNA Oligomer
gauaacacugccauggugaaaug

SEQ ID NO: 4189 - RNA, 23 nt, artificial
  siRNA Oligomer
uccaaucagugaguaaaguuuuu

SEQ ID NO: 4190 - RNA, 23 nt, artificial
  siRNA Oligomer
acacagaaagaaaagagacuaca

SEQ ID NO: 4191 - RNA, 23 nt, artificial
  siRNA Oligomer
cacaccuguuuuucaguaacacc

SEQ ID NO: 4192 - RNA, 23 nt, artificial
  siRNA Oligomer
caguauucaacacuuaagaacag

SEQ ID NO: 4193 - RNA, 23 nt, artificial
  siRNA Oligomer
caaucagugaguaaaguuuuuuc

SEQ ID NO: 4194 - RNA, 23 nt, artificial
  siRNA Oligomer
acuacacacaaaaauaucaguuc

SEQ ID NO: 4195 - RNA, 23 nt, artificial
  siRNA Oligomer
aggacaacaguucuacaucgaug

SEQ ID NO: 4196 - RNA, 23 nt, artificial
  siRNA Oligomer
acaaggaccuuugagcaaccaag

SEQ ID NO: 4197 - RNA, 23 nt, artificial
  siRNA Oligomer
agagauaaugaucuacuuaguug

SEQ ID NO: 4198 - RNA, 23 nt, artificial
  siRNA Oligomer
acagacaguucuccagcauuuua

SEQ ID NO: 4199 - RNA, 23 nt, artificial
  siRNA Oligomer
gaaaccugaauaagcuccuuauc

SEQ ID NO: 4200 - RNA, 23 nt, artificial
  siRNA Oligomer
aaccauggucaacggcucuguuu

SEQ ID NO: 4201 - RNA, 23 nt, artificial
  siRNA Oligomer
caguagucaaaaucacuuagcag

SEQ ID NO: 4202 - RNA, 23 nt, artificial
  siRNA Oligomer
cucuuuaaaacauuagagugagg

SEQ ID NO: 4203 - RNA, 23 nt, artificial
  siRNA Oligomer
uaaacacaaguguaagcucaaaa

SEQ ID NO: 4204 - RNA, 23 nt, artificial
  siRNA Oligomer
acaggaucacaccuguuuuucag

SEQ ID NO: 4205 - RNA, 23 nt, artificial
  siRNA Oligomer
aagccaucaccauuuuguaagca

SEQ ID NO: 4206 - RNA, 23 nt, artificial
  siRNA Oligomer
gguuaagcuuuaauuaaacucac

SEQ ID NO: 4207 - RNA, 23 nt, artificial
  siRNA Oligomer
aacagccuuccauaagccaucac

SEQ ID NO: 4208 - RNA, 23 nt, artificial
  siRNA Oligomer
acccguuucaauaauucaaagug

SEQ ID NO: 4209 - RNA, 23 nt, artificial
  siRNA Oligomer
acagcggcagaaacacagugaac

SEQ ID NO: 4210 - RNA, 23 nt, artificial
  siRNA Oligomer
ucugaaaugcuggccggguucuu

SEQ ID NO: 4211 - RNA, 23 nt, artificial
  siRNA Oligomer
aucauucacucaauggaagagua

SEQ ID NO: 4212 - RNA, 23 nt, artificial
  siRNA Oligomer
ugggucaguuucucagggacaag

SEQ ID NO: 4213 - RNA, 23 nt, artificial
  siRNA Oligomer
ugaggaaagccgcaggacaucuu

SEQ ID NO: 4214 - RNA, 23 nt, artificial
  siRNA Oligomer
aaacacagaaagaaaagagacua

SEQ ID NO: 4215 - RNA, 23 nt, artificial
  siRNA Oligomer
aguuuaaagacaguauucaacac

SEQ ID NO: 4216 - RNA, 23 nt, artificial
  siRNA Oligomer
ucagccuguuagcugcaguugcu

SEQ ID NO: 4217 - RNA, 23 nt, artificial
  siRNA Oligomer
ccagcuuuuuacauacauuuuca

SEQ ID NO: 4218 - RNA, 23 nt, artificial
  siRNA Oligomer
ugugaaacacagaaagaaaagag

SEQ ID NO: 4219 - RNA, 23 nt, artificial
  siRNA Oligomer
aaguggagcuaauagcuagggca

SEQ ID NO: 4220 - RNA, 23 nt, artificial
  siRNA Oligomer
ugagcaaccaaguuuaguuugcu

SEQ ID NO: 4221 - RNA, 23 nt, artificial
  siRNA Oligomer
acuuuagcugacuagcugaauag

SEQ ID NO: 4222 - RNA, 23 nt, artificial
  siRNA Oligomer
aaccagaggagaagcgaccucua

SEQ ID NO: 4223 - RNA, 23 nt, artificial
  siRNA Oligomer
aggaacugguggugugggcuuuu

SEQ ID NO: 4224 - RNA, 23 nt, artificial
  siRNA Oligomer
gucaguuucucagggacaaggac

SEQ ID NO: 4225 - RNA, 23 nt, artificial
  siRNA Oligomer
accaagaaacagugaagcaguuc

SEQ ID NO: 4226 - RNA, 23 nt, artificial
  siRNA Oligomer
caaccauggucaacggcucuguu

SEQ ID NO: 4227 - RNA, 23 nt, artificial
  siRNA Oligomer
auggaagaguaaucaacuacaca

SEQ ID NO: 4228 - RNA, 23 nt, artificial
  siRNA Oligomer
uaccucguugagguuggguucag

SEQ ID NO: 4229 - RNA, 23 nt, artificial
  siRNA Oligomer
agagauacuucaauucccagaaa

SEQ ID NO: 4230 - RNA, 23 nt, artificial
  siRNA Oligomer
acccacagcaaggauaugaaagc

SEQ ID NO: 4231 - RNA, 23 nt, artificial
  siRNA Oligomer
gauagauuacuaagugaaucaga

SEQ ID NO: 4232 - RNA, 23 nt, artificial
  siRNA Oligomer
acaacaccgugguuacugaaaug

SEQ ID NO: 4233 - RNA, 23 nt, artificial
  siRNA Oligomer
aaagccuugcugaauugaacauu

SEQ ID NO: 4234 - RNA, 23 nt, artificial
  siRNA Oligomer
ucuccagcaugugaaguggagcu

SEQ ID NO: 4235 - RNA, 23 nt, artificial
  siRNA Oligomer
ugagcaauucucugggucaguuu

SEQ ID NO: 4236 - RNA, 23 nt, artificial
  siRNA Oligomer
uccugcuuaaacacaaguguaag

SEQ ID NO: 4237 - RNA, 23 nt, artificial
  siRNA Oligomer
acacagugaaccuuuggagcuua

SEQ ID NO: 4238 - RNA, 23 nt, artificial
  siRNA Oligomer
aacacaaguguaagcucaaaagu

SEQ ID NO: 4239 - RNA, 23 nt, artificial
  siRNA Oligomer
aucacaccuguuuuucaguaaca

SEQ ID NO: 4240 - RNA, 23 nt, artificial
  siRNA Oligomer
acagguauccaagguggaaaaaa

SEQ ID NO: 4241 - RNA, 23 nt, artificial
  siRNA Oligomer
ucauucacucaauggaagaguaa

SEQ ID NO: 4242 - RNA, 23 nt, artificial
  siRNA Oligomer
caguguucuaacaaacuaaacuc

SEQ ID NO: 4243 - RNA, 23 nt, artificial
  siRNA Oligomer
ccaguguucuaacaaacuaaacu

SEQ ID NO: 4244 - RNA, 23 nt, artificial
  siRNA Oligomer
gccaguguucuaacaaacuaaac

SEQ ID NO: 4245 - RNA, 23 nt, artificial
  siRNA Oligomer
agccaguguucuaacaaacuaaa

SEQ ID NO: 4246 - RNA, 23 nt, artificial
  siRNA Oligomer
uagccaguguucuaacaaacuaa

SEQ ID NO: 4247 - RNA, 23 nt, artificial
  siRNA Oligomer
uuagccaguguucuaacaaacua

SEQ ID NO: 4248 - RNA, 23 nt, artificial
  siRNA Oligomer
ggauuauguuguuccugaaccca

SEQ ID NO: 4249 - RNA, 23 nt, artificial
  siRNA Oligomer
gggauuauguuguuccugaaccc

SEQ ID NO: 4250 - RNA, 23 nt, artificial
  siRNA Oligomer
ugggauuauguuguuccugaacc

SEQ ID NO: 4251 - RNA, 23 nt, artificial
  siRNA Oligomer
cugggauuauguuguuccugaac

SEQ ID NO: 4252 - RNA, 23 nt, artificial
  siRNA Oligomer
acugggauuauguuguuccugaa

SEQ ID NO: 4253 - RNA, 23 nt, artificial
  siRNA Oligomer
ggcuuuucugggaauugaaguau

SEQ ID NO: 4254 - RNA, 23 nt, artificial
  siRNA Oligomer
gggcuuuucugggaauugaagua

SEQ ID NO: 4255 - RNA, 23 nt, artificial
  siRNA Oligomer
ugggcuuuucugggaauugaagu

SEQ ID NO: 4256 - RNA, 23 nt, artificial
  siRNA Oligomer
cugggcuuuucugggaauugaag

SEQ ID NO: 4257 - RNA, 23 nt, artificial
  siRNA Oligomer
ucugggcuuuucugggaauugaa

SEQ ID NO: 4258 - RNA, 23 nt, artificial
  siRNA Oligomer
gauggaauagguaagcaaaagua

SEQ ID NO: 4259 - RNA, 23 nt, artificial
  siRNA Oligomer
ggauggaauagguaagcaaaagu

SEQ ID NO: 4260 - RNA, 23 nt, artificial
  siRNA Oligomer
gggauggaauagguaagcaaaag

SEQ ID NO: 4261 - RNA, 23 nt, artificial
  siRNA Oligomer
ugggauggaauagguaagcaaaa

SEQ ID NO: 4262 - RNA, 23 nt, artificial
  siRNA Oligomer
augggauggaauagguaagcaaa

SEQ ID NO: 4263 - RNA, 23 nt, artificial
  siRNA Oligomer
cgugaacuuggaaauugaaaaug

SEQ ID NO: 4264 - RNA, 23 nt, artificial
  siRNA Oligomer
acgugaacuuggaaauugaaaau

SEQ ID NO: 4265 - RNA, 23 nt, artificial
  siRNA Oligomer
cacgugaacuuggaaauugaaaa

SEQ ID NO: 4266 - RNA, 23 nt, artificial
  siRNA Oligomer
gcacgugaacuuggaaauugaaa

SEQ ID NO: 4267 - RNA, 23 nt, artificial
  siRNA Oligomer
ugcacgugaacuuggaaauugaa

SEQ ID NO: 4268 - RNA, 23 nt, artificial
  siRNA Oligomer
aaugggauggaauagguaagcaa

SEQ ID NO: 4269 - RNA, 23 nt, artificial
  siRNA Oligomer
auuagccaguguucuaacaaacu

SEQ ID NO: 4270 - RNA, 23 nt, artificial
  siRNA Oligomer
aauuagccaguguucuaacaaac

SEQ ID NO: 4271 - RNA, 23 nt, artificial
  siRNA Oligomer
aaauuagccaguguucuaacaaa

SEQ ID NO: 4272 - RNA, 23 nt, artificial
  siRNA Oligomer
gauugaaggguccuaaaaaggga

SEQ ID NO: 4273 - RNA, 23 nt, artificial
  siRNA Oligomer
ugauugaaggguccuaaaaaggg

SEQ ID NO: 4274 - RNA, 23 nt, artificial
  siRNA Oligomer
gugauugaaggguccuaaaaagg

SEQ ID NO: 4275 - RNA, 23 nt, artificial
  siRNA Oligomer
agugauugaaggguccuaaaaag

SEQ ID NO: 4276 - RNA, 23 nt, artificial
  siRNA Oligomer
cagugauugaaggguccuaaaaa

SEQ ID NO: 4277 - RNA, 23 nt, artificial
  siRNA Oligomer
gaaugaugaauaccugugaggau

SEQ ID NO: 4278 - RNA, 23 nt, artificial
  siRNA Oligomer
ugaaugaugaauaccugugagga

SEQ ID NO: 4279 - RNA, 23 nt, artificial
  siRNA Oligomer
gugaaugaugaauaccugugagg

SEQ ID NO: 4280 - RNA, 23 nt, artificial
  siRNA Oligomer
agugaaugaugaauaccugugag

SEQ ID NO: 4281 - RNA, 23 nt, artificial
  siRNA Oligomer
gagugaaugaugaauaccuguga

SEQ ID NO: 4282 - RNA, 23 nt, artificial
  siRNA Oligomer
cagagagccugcuaagugauuuu

SEQ ID NO: 4283 - RNA, 23 nt, artificial
  siRNA Oligomer
ccagagagccugcuaagugauuu

SEQ ID NO: 4284 - RNA, 23 nt, artificial
  siRNA Oligomer
cccagagagccugcuaagugauu

SEQ ID NO: 4285 - RNA, 23 nt, artificial
  siRNA Oligomer
acccagagagccugcuaagugau

SEQ ID NO: 4286 - RNA, 23 nt, artificial
  siRNA Oligomer
cacccagagagccugcuaaguga

SEQ ID NO: 4287 - RNA, 23 nt, artificial
  siRNA Oligomer
agaauugggccaagauaaaucaa

SEQ ID NO: 4288 - RNA, 23 nt, artificial
  siRNA Oligomer
uagaauugggccaagauaaauca

SEQ ID NO: 4289 - RNA, 23 nt, artificial
  siRNA Oligomer
auagaauugggccaagauaaauc

SEQ ID NO: 4290 - RNA, 23 nt, artificial
  siRNA Oligomer
uauagaauugggccaagauaaau

SEQ ID NO: 4291 - RNA, 23 nt, artificial
  siRNA Oligomer
uuauagaauugggccaagauaaa

SEQ ID NO: 4292 - RNA, 23 nt, artificial
  siRNA Oligomer
ugcugugggucguggauaaggag

SEQ ID NO: 4293 - RNA, 23 nt, artificial
  siRNA Oligomer
uugcugugggucguggauaagga

SEQ ID NO: 4294 - RNA, 23 nt, artificial
  siRNA Oligomer
cuugcugugggucguggauaagg

SEQ ID NO: 4295 - RNA, 23 nt, artificial
  siRNA Oligomer
ccuugcugugggucguggauaag

SEQ ID NO: 4296 - RNA, 23 nt, artificial
  siRNA Oligomer
uccuugcugugggucguggauaa

SEQ ID NO: 4297 - RNA, 23 nt, artificial
  siRNA Oligomer
agguaagaguaaaugagaaauau

SEQ ID NO: 4298 - RNA, 23 nt, artificial
  siRNA Oligomer
uagguaagaguaaaugagaaaua

SEQ ID NO: 4299 - RNA, 23 nt, artificial
  siRNA Oligomer
cuagguaagaguaaaugagaaau

SEQ ID NO: 4300 - RNA, 23 nt, artificial
  siRNA Oligomer
ccuagguaagaguaaaugagaaa

SEQ ID NO: 4301 - RNA, 23 nt, artificial
  siRNA Oligomer
cccuagguaagaguaaaugagaa

SEQ ID NO: 4302 - RNA, 23 nt, artificial
  siRNA Oligomer
cuguccaaaucaaagcaaacuaa

SEQ ID NO: 4303 - RNA, 23 nt, artificial
  siRNA Oligomer
ucuguccaaaucaaagcaaacua

SEQ ID NO: 4304 - RNA, 23 nt, artificial
  siRNA Oligomer
gucuguccaaaucaaagcaaacu

SEQ ID NO: 4305 - RNA, 23 nt, artificial
  siRNA Oligomer
ugucuguccaaaucaaagcaaac

SEQ ID NO: 4306 - RNA, 23 nt, artificial
  siRNA Oligomer
cugucuguccaaaucaaagcaaa

SEQ ID NO: 4307 - RNA, 23 nt, artificial
  siRNA Oligomer
ucaugauuggguaguaaaacuau

SEQ ID NO: 4308 - RNA, 23 nt, artificial
  siRNA Oligomer
uucaugauuggguaguaaaacua

SEQ ID NO: 4309 - RNA, 23 nt, artificial
  siRNA Oligomer
uuucaugauuggguaguaaaacu

SEQ ID NO: 4310 - RNA, 23 nt, artificial
  siRNA Oligomer
auuucaugauuggguaguaaaac

SEQ ID NO: 4311 - RNA, 23 nt, artificial
  siRNA Oligomer
uauuucaugauuggguaguaaaa

SEQ ID NO: 4312 - RNA, 23 nt, artificial
  siRNA Oligomer
acagugauugaaggguccuaaaa

SEQ ID NO: 4313 - RNA, 23 nt, artificial
  siRNA Oligomer
aacagugauugaaggguccuaaa

SEQ ID NO: 4314 - RNA, 23 nt, artificial
  siRNA Oligomer
ggaaggcuguuaaauuaauauuc

SEQ ID NO: 4315 - RNA, 23 nt, artificial
  siRNA Oligomer
uggaaggcuguuaaauuaauauu

SEQ ID NO: 4316 - RNA, 23 nt, artificial
  siRNA Oligomer
auggaaggcuguuaaauuaauau

SEQ ID NO: 4317 - RNA, 23 nt, artificial
  siRNA Oligomer
uauggaaggcuguuaaauuaaua

SEQ ID NO: 4318 - RNA, 23 nt, artificial
  siRNA Oligomer
uuauggaaggcuguuaaauuaau

SEQ ID NO: 4319 - RNA, 23 nt, artificial
  siRNA Oligomer
caaggguaguagcuguauacuac

SEQ ID NO: 4320 - RNA, 23 nt, artificial
  siRNA Oligomer
ucaaggguaguagcuguauacua

SEQ ID NO: 4321 - RNA, 23 nt, artificial
  siRNA Oligomer
gucaaggguaguagcuguauacu

SEQ ID NO: 4322 - RNA, 23 nt, artificial
  siRNA Oligomer
ugucaaggguaguagcuguauac

SEQ ID NO: 4323 - RNA, 23 nt, artificial
  siRNA Oligomer
uugucaaggguaguagcuguaua

SEQ ID NO: 4324 - RNA, 23 nt, artificial
  siRNA Oligomer
ccaaaucaaagcaaacuaaacuu

SEQ ID NO: 4325 - RNA, 23 nt, artificial
  siRNA Oligomer
uccaaaucaaagcaaacuaaacu

SEQ ID NO: 4326 - RNA, 23 nt, artificial
  siRNA Oligomer
guccaaaucaaagcaaacuaaac

SEQ ID NO: 4327 - RNA, 23 nt, artificial
  siRNA Oligomer
uguccaaaucaaagcaaacuaaa

SEQ ID NO: 4328 - RNA, 23 nt, artificial
  siRNA Oligomer
gcuuauggaaggcuguuaaauua

SEQ ID NO: 4329 - RNA, 23 nt, artificial
  siRNA Oligomer
ggcuuauggaaggcuguuaaauu

SEQ ID NO: 4330 - RNA, 23 nt, artificial
  siRNA Oligomer
uggcuuauggaaggcuguuaaau

SEQ ID NO: 4331 - RNA, 23 nt, artificial
  siRNA Oligomer
auggcuuauggaaggcuguuaaa

SEQ ID NO: 4332 - RNA, 23 nt, artificial
  siRNA Oligomer
gauggcuuauggaaggcuguuaa

SEQ ID NO: 4333 - RNA, 23 nt, artificial
  siRNA Oligomer
uccuguuacugauacuauaagug

SEQ ID NO: 4334 - RNA, 23 nt, artificial
  siRNA Oligomer
auccuguuacugauacuauaagu

SEQ ID NO: 4335 - RNA, 23 nt, artificial
  siRNA Oligomer
gauccuguuacugauacuauaag

SEQ ID NO: 4336 - RNA, 23 nt, artificial
  siRNA Oligomer
ugauccuguuacugauacuauaa

SEQ ID NO: 4337 - RNA, 23 nt, artificial
  siRNA Oligomer
gugauccuguuacugauacuaua

SEQ ID NO: 4338 - RNA, 23 nt, artificial
  siRNA Oligomer
gguccuugucccugagaaacuga

SEQ ID NO: 4339 - RNA, 23 nt, artificial
  siRNA Oligomer
agguccuugucccugagaaacug

SEQ ID NO: 4340 - RNA, 23 nt, artificial
  siRNA Oligomer
aagguccuugucccugagaaacu

SEQ ID NO: 4341 - RNA, 23 nt, artificial
  siRNA Oligomer
aaagguccuugucccugagaaac

SEQ ID NO: 4342 - RNA, 23 nt, artificial
  siRNA Oligomer
caaagguccuugucccugagaaa

SEQ ID NO: 4343 - RNA, 23 nt, artificial
  siRNA Oligomer
ccaacuaaguagaucauuaucuc

SEQ ID NO: 4344 - RNA, 23 nt, artificial
  siRNA Oligomer
uccaacuaaguagaucauuaucu

SEQ ID NO: 4345 - RNA, 23 nt, artificial
  siRNA Oligomer
uuccaacuaaguagaucauuauc

SEQ ID NO: 4346 - RNA, 23 nt, artificial
  siRNA Oligomer
auuccaacuaaguagaucauuau

SEQ ID NO: 4347 - RNA, 23 nt, artificial
  siRNA Oligomer
uauuccaacuaaguagaucauua

SEQ ID NO: 4348 - RNA, 23 nt, artificial
  siRNA Oligomer
ugguuaaaaugcuggagaacugu

SEQ ID NO: 4349 - RNA, 23 nt, artificial
  siRNA Oligomer
uugguuaaaaugcuggagaacug

SEQ ID NO: 4350 - RNA, 23 nt, artificial
  siRNA Oligomer
uuugguuaaaaugcuggagaacu

SEQ ID NO: 4351 - RNA, 23 nt, artificial
  siRNA Oligomer
auuugguuaaaaugcuggagaac

SEQ ID NO: 4352 - RNA, 23 nt, artificial
  siRNA Oligomer
aauuugguuaaaaugcuggagaa

SEQ ID NO: 4353 - RNA, 23 nt, artificial
  siRNA Oligomer
ccauugagugaaugaugaauacc

SEQ ID NO: 4354 - RNA, 23 nt, artificial
  siRNA Oligomer
uccauugagugaaugaugaauac

SEQ ID NO: 4355 - RNA, 23 nt, artificial
  siRNA Oligomer
uuccauugagugaaugaugaaua

SEQ ID NO: 4356 - RNA, 23 nt, artificial
  siRNA Oligomer
cuuccauugagugaaugaugaau

SEQ ID NO: 4357 - RNA, 23 nt, artificial
  siRNA Oligomer
ucuuccauugagugaaugaugaa

SEQ ID NO: 4358 - RNA, 23 nt, artificial
  siRNA Oligomer
gaauuuagccuccacucaacaau

SEQ ID NO: 4359 - RNA, 23 nt, artificial
  siRNA Oligomer
agaauuuagccuccacucaacaa

SEQ ID NO: 4360 - RNA, 23 nt, artificial
  siRNA Oligomer
gagaauuuagccuccacucaaca

SEQ ID NO: 4361 - RNA, 23 nt, artificial
  siRNA Oligomer
agagaauuuagccuccacucaac

SEQ ID NO: 4362 - RNA, 23 nt, artificial
  siRNA Oligomer
gagagaauuuagccuccacucaa

SEQ ID NO: 4363 - RNA, 23 nt, artificial
  siRNA Oligomer
caggauuucgacuuguuaagaaa

SEQ ID NO: 4364 - RNA, 23 nt, artificial
  siRNA Oligomer
ucaggauuucgacuuguuaagaa

SEQ ID NO: 4365 - RNA, 23 nt, artificial
  siRNA Oligomer
cucaggauuucgacuuguuaaga

SEQ ID NO: 4366 - RNA, 23 nt, artificial
  siRNA Oligomer
gcucaggauuucgacuuguuaag

SEQ ID NO: 4367 - RNA, 23 nt, artificial
  siRNA Oligomer
agcucaggauuucgacuuguuaa

SEQ ID NO: 4368 - RNA, 23 nt, artificial
  siRNA Oligomer
augcacgugaacuuggaaauuga

SEQ ID NO: 4369 - RNA, 23 nt, artificial
  siRNA Oligomer
gugugauccuguuacugauacua

SEQ ID NO: 4370 - RNA, 23 nt, artificial
  siRNA Oligomer
ggugugauccuguuacugauacu

SEQ ID NO: 4371 - RNA, 23 nt, artificial
  siRNA Oligomer
aggugugauccuguuacugauac

SEQ ID NO: 4372 - RNA, 23 nt, artificial
  siRNA Oligomer
caggugugauccuguuacugaua

SEQ ID NO: 4373 - RNA, 23 nt, artificial
  siRNA Oligomer
acaggugugauccuguuacugau

SEQ ID NO: 4374 - RNA, 23 nt, artificial
  siRNA Oligomer
caguauuacaugugcuuaaucuc

SEQ ID NO: 4375 - RNA, 23 nt, artificial
  siRNA Oligomer
ucaguauuacaugugcuuaaucu

SEQ ID NO: 4376 - RNA, 23 nt, artificial
  siRNA Oligomer
uucaguauuacaugugcuuaauc

SEQ ID NO: 4377 - RNA, 23 nt, artificial
  siRNA Oligomer
uuucaguauuacaugugcuuaau

SEQ ID NO: 4378 - RNA, 23 nt, artificial
  siRNA Oligomer
uuuucaguauuacaugugcuuaa

SEQ ID NO: 4379 - RNA, 23 nt, artificial
  siRNA Oligomer
ccaccugcccuaaauaagaaacc

SEQ ID NO: 4380 - RNA, 23 nt, artificial
  siRNA Oligomer
cccaccugcccuaaauaagaaac

SEQ ID NO: 4381 - RNA, 23 nt, artificial
  siRNA Oligomer
ccccaccugcccuaaauaagaaa

SEQ ID NO: 4382 - RNA, 23 nt, artificial
  siRNA Oligomer
gccccaccugcccuaaauaagaa

SEQ ID NO: 4383 - RNA, 23 nt, artificial
  siRNA Oligomer
ugccccaccugcccuaaauaaga

SEQ ID NO: 4384 - RNA, 23 nt, artificial
  siRNA Oligomer
gguaagaguaaaugagaaauauu

SEQ ID NO: 4385 - RNA, 23 nt, artificial
  siRNA Oligomer
ggagaacugucuguccaaaucaa

SEQ ID NO: 4386 - RNA, 23 nt, artificial
  siRNA Oligomer
uggagaacugucuguccaaauca

SEQ ID NO: 4387 - RNA, 23 nt, artificial
  siRNA Oligomer
cuggagaacugucuguccaaauc

SEQ ID NO: 4388 - RNA, 23 nt, artificial
  siRNA Oligomer
gcuggagaacugucuguccaaau

SEQ ID NO: 4389 - RNA, 23 nt, artificial
  siRNA Oligomer
ugcuggagaacugucuguccaaa

SEQ ID NO: 4390 - RNA, 23 nt, artificial
  siRNA Oligomer
cgagguaauauuugaggaaucaa

SEQ ID NO: 4391 - RNA, 23 nt, artificial
  siRNA Oligomer
acgagguaauauuugaggaauca

SEQ ID NO: 4392 - RNA, 23 nt, artificial
  siRNA Oligomer
aacgagguaauauuugaggaauc

SEQ ID NO: 4393 - RNA, 23 nt, artificial
  siRNA Oligomer
caacgagguaauauuugaggaau

SEQ ID NO: 4394 - RNA, 23 nt, artificial
  siRNA Oligomer
ucaacgagguaauauuugaggaa

SEQ ID NO: 4395 - RNA, 23 nt, artificial
  siRNA Oligomer
gcuuggaaagauacuacaaagcc

SEQ ID NO: 4396 - RNA, 23 nt, artificial
  siRNA Oligomer
ugcuuggaaagauacuacaaagc

SEQ ID NO: 4397 - RNA, 23 nt, artificial
  siRNA Oligomer
augcuuggaaagauacuacaaag

SEQ ID NO: 4398 - RNA, 23 nt, artificial
  siRNA Oligomer
aaugcuuggaaagauacuacaaa

SEQ ID NO: 4399 - RNA, 23 nt, artificial
  siRNA Oligomer
aaaugcuuggaaagauacuacaa

SEQ ID NO: 4400 - RNA, 23 nt, artificial
  siRNA Oligomer
cuaaaaugucacuguucaaauua

SEQ ID NO: 4401 - RNA, 23 nt, artificial
  siRNA Oligomer
ccuaaaaugucacuguucaaauu

SEQ ID NO: 4402 - RNA, 23 nt, artificial
  siRNA Oligomer
accuaaaaugucacuguucaaau

SEQ ID NO: 4403 - RNA, 23 nt, artificial
  siRNA Oligomer
gaccuaaaaugucacuguucaaa

SEQ ID NO: 4404 - RNA, 23 nt, artificial
  siRNA Oligomer
ugaccuaaaaugucacuguucaa

SEQ ID NO: 4405 - RNA, 23 nt, artificial
  siRNA Oligomer
gugacuuccucacucuaauguuu

SEQ ID NO: 4406 - RNA, 23 nt, artificial
  siRNA Oligomer
ggugacuuccucacucuaauguu

SEQ ID NO: 4407 - RNA, 23 nt, artificial
  siRNA Oligomer
uggugacuuccucacucuaaugu

SEQ ID NO: 4408 - RNA, 23 nt, artificial
  siRNA Oligomer
uuggugacuuccucacucuaaug

SEQ ID NO: 4409 - RNA, 23 nt, artificial
  siRNA Oligomer
cuuggugacuuccucacucuaau

SEQ ID NO: 4410 - RNA, 23 nt, artificial
  siRNA Oligomer
gaaugggauggaauagguaagca

SEQ ID NO: 4411 - RNA, 23 nt, artificial
  siRNA Oligomer
ugaaugggauggaauagguaagc

SEQ ID NO: 4412 - RNA, 23 nt, artificial
  siRNA Oligomer
uugaaugggauggaauagguaag

SEQ ID NO: 4413 - RNA, 23 nt, artificial
  siRNA Oligomer
auugaaugggauggaauagguaa

SEQ ID NO: 4414 - RNA, 23 nt, artificial
  siRNA Oligomer
aauugaaugggauggaauaggua

SEQ ID NO: 4415 - RNA, 23 nt, artificial
  siRNA Oligomer
gccuguuaugcuuacaaaauggu

SEQ ID NO: 4416 - RNA, 23 nt, artificial
  siRNA Oligomer
ugccuguuaugcuuacaaaaugg

SEQ ID NO: 4417 - RNA, 23 nt, artificial
  siRNA Oligomer
uugccuguuaugcuuacaaaaug

SEQ ID NO: 4418 - RNA, 23 nt, artificial
  siRNA Oligomer
cuugccuguuaugcuuacaaaau

SEQ ID NO: 4419 - RNA, 23 nt, artificial
  siRNA Oligomer
ucuugccuguuaugcuuacaaaa

SEQ ID NO: 4420 - RNA, 23 nt, artificial
  siRNA Oligomer
agguaggcuugguaauagacuau

SEQ ID NO: 4421 - RNA, 23 nt, artificial
  siRNA Oligomer
cagguaggcuugguaauagacua

SEQ ID NO: 4422 - RNA, 23 nt, artificial
  siRNA Oligomer
ucagguaggcuugguaauagacu

SEQ ID NO: 4423 - RNA, 23 nt, artificial
  siRNA Oligomer
uucagguaggcuugguaauagac

SEQ ID NO: 4424 - RNA, 23 nt, artificial
  siRNA Oligomer
uuucagguaggcuugguaauaga

SEQ ID NO: 4425 - RNA, 23 nt, artificial
  siRNA Oligomer
gaugaauaccugugaggauagga

SEQ ID NO: 4426 - RNA, 23 nt, artificial
  siRNA Oligomer
ugaugaauaccugugaggauagg

SEQ ID NO: 4427 - RNA, 23 nt, artificial
  siRNA Oligomer
augaugaauaccugugaggauag

SEQ ID NO: 4428 - RNA, 23 nt, artificial
  siRNA Oligomer
aaugaugaauaccugugaggaua

SEQ ID NO: 4429 - RNA, 23 nt, artificial
  siRNA Oligomer
cugucacuagggaauaauaaagg

SEQ ID NO: 4430 - RNA, 23 nt, artificial
  siRNA Oligomer
ccugucacuagggaauaauaaag

SEQ ID NO: 4431 - RNA, 23 nt, artificial
  siRNA Oligomer
accugucacuagggaauaauaaa

SEQ ID NO: 4432 - RNA, 23 nt, artificial
  siRNA Oligomer
uaccugucacuagggaauaauaa

SEQ ID NO: 4433 - RNA, 23 nt, artificial
  siRNA Oligomer
auaccugucacuagggaauaaua

SEQ ID NO: 4434 - RNA, 23 nt, artificial
  siRNA Oligomer
guuuuaaagaggcaacaaaagcu

SEQ ID NO: 4435 - RNA, 23 nt, artificial
  siRNA Oligomer
uguuuuaaagaggcaacaaaagc

SEQ ID NO: 4436 - RNA, 23 nt, artificial
  siRNA Oligomer
auguuuuaaagaggcaacaaaag

SEQ ID NO: 4437 - RNA, 23 nt, artificial
  siRNA Oligomer
aauguuuuaaagaggcaacaaaa

SEQ ID NO: 4438 - RNA, 23 nt, artificial
  siRNA Oligomer
uaauguuuuaaagaggcaacaaa

SEQ ID NO: 4439 - RNA, 23 nt, artificial
  siRNA Oligomer
guguucuaacaaacuaaacucuu

SEQ ID NO: 4440 - RNA, 23 nt, artificial
  siRNA Oligomer
aguguucuaacaaacuaaacucu

SEQ ID NO: 4441 - RNA, 23 nt, artificial
  siRNA Oligomer
gcuugguaauagacuauauaaac

SEQ ID NO: 4442 - RNA, 23 nt, artificial
  siRNA Oligomer
ggcuugguaauagacuauauaaa

SEQ ID NO: 4443 - RNA, 23 nt, artificial
  siRNA Oligomer
aggcuugguaauagacuauauaa

SEQ ID NO: 4444 - RNA, 23 nt, artificial
  siRNA Oligomer
uaggcuugguaauagacuauaua

SEQ ID NO: 4445 - RNA, 23 nt, artificial
  siRNA Oligomer
guaggcuugguaauagacuauau

SEQ ID NO: 4446 - RNA, 23 nt, artificial
  siRNA Oligomer
cauccugguguuacugaaaaaca

SEQ ID NO: 4447 - RNA, 23 nt, artificial
  siRNA Oligomer
ucauccugguguuacugaaaaac

SEQ ID NO: 4448 - RNA, 23 nt, artificial
  siRNA Oligomer
uucauccugguguuacugaaaaa

SEQ ID NO: 4449 - RNA, 23 nt, artificial
  siRNA Oligomer
auucauccugguguuacugaaaa

SEQ ID NO: 4450 - RNA, 23 nt, artificial
  siRNA Oligomer
uauucauccugguguuacugaaa

SEQ ID NO: 4451 - RNA, 23 nt, artificial
  siRNA Oligomer
gccuaucaaaacuuccaaaagcc

SEQ ID NO: 4452 - RNA, 23 nt, artificial
  siRNA Oligomer
agccuaucaaaacuuccaaaagc

SEQ ID NO: 4453 - RNA, 23 nt, artificial
  siRNA Oligomer
uagccuaucaaaacuuccaaaag

SEQ ID NO: 4454 - RNA, 23 nt, artificial
  siRNA Oligomer
uuagccuaucaaaacuuccaaaa

SEQ ID NO: 4455 - RNA, 23 nt, artificial
  siRNA Oligomer
uuuagccuaucaaaacuuccaaa

SEQ ID NO: 4456 - RNA, 23 nt, artificial
  siRNA Oligomer
uccugguguuacugaaaaacagg

SEQ ID NO: 4457 - RNA, 23 nt, artificial
  siRNA Oligomer
auccugguguuacugaaaaacag

SEQ ID NO: 4458 - RNA, 23 nt, artificial
  siRNA Oligomer
ccacgguguuguuuuagaugccu

SEQ ID NO: 4459 - RNA, 23 nt, artificial
  siRNA Oligomer
accacgguguuguuuuagaugcc

SEQ ID NO: 4460 - RNA, 23 nt, artificial
  siRNA Oligomer
aaccacgguguuguuuuagaugc

SEQ ID NO: 4461 - RNA, 23 nt, artificial
  siRNA Oligomer
uaaccacgguguuguuuuagaug

SEQ ID NO: 4462 - RNA, 23 nt, artificial
  siRNA Oligomer
guaaccacgguguuguuuuagau

SEQ ID NO: 4463 - RNA, 23 nt, artificial
  siRNA Oligomer
acaaaauggugauggcuuaugga

SEQ ID NO: 4464 - RNA, 23 nt, artificial
  siRNA Oligomer
uacaaaauggugauggcuuaugg

SEQ ID NO: 4465 - RNA, 23 nt, artificial
  siRNA Oligomer
uuacaaaauggugauggcuuaug

SEQ ID NO: 4466 - RNA, 23 nt, artificial
  siRNA Oligomer
cuuacaaaauggugauggcuuau

SEQ ID NO: 4467 - RNA, 23 nt, artificial
  siRNA Oligomer
gcuuacaaaauggugauggcuua

SEQ ID NO: 4468 - RNA, 23 nt, artificial
  siRNA Oligomer
gcaguuugagcagcaagaacccg

SEQ ID NO: 4469 - RNA, 23 nt, artificial
  siRNA Oligomer
ggcaguuugagcagcaagaaccc

SEQ ID NO: 4470 - RNA, 23 nt, artificial
  siRNA Oligomer
uggcaguuugagcagcaagaacc

SEQ ID NO: 4471 - RNA, 23 nt, artificial
  siRNA Oligomer
cuggcaguuugagcagcaagaac

SEQ ID NO: 4472 - RNA, 23 nt, artificial
  siRNA Oligomer
acuggcaguuugagcagcaagaa

SEQ ID NO: 4473 - RNA, 23 nt, artificial
  siRNA Oligomer
cuuggaaagauacuacaaagcca

SEQ ID NO: 4474 - RNA, 23 nt, artificial
  siRNA Oligomer
gugugauucuagcgucguaccua

SEQ ID NO: 4475 - RNA, 23 nt, artificial
  siRNA Oligomer
ugugugauucuagcgucguaccu

SEQ ID NO: 4476 - RNA, 23 nt, artificial
  siRNA Oligomer
gugugugauucuagcgucguacc

SEQ ID NO: 4477 - RNA, 23 nt, artificial
  siRNA Oligomer
ugugugugauucuagcgucguac

SEQ ID NO: 4478 - RNA, 23 nt, artificial
  siRNA Oligomer
uugugugugauucuagcgucgua

SEQ ID NO: 4479 - RNA, 23 nt, artificial
  siRNA Oligomer
cuugggcaucgauguagaacugu

SEQ ID NO: 4480 - RNA, 23 nt, artificial
  siRNA Oligomer
ucuugggcaucgauguagaacug

SEQ ID NO: 4481 - RNA, 23 nt, artificial
  siRNA Oligomer
uucuugggcaucgauguagaacu

SEQ ID NO: 4482 - RNA, 23 nt, artificial
  siRNA Oligomer
cuucuugggcaucgauguagaac

SEQ ID NO: 4483 - RNA, 23 nt, artificial
  siRNA Oligomer
gcuucuugggcaucgauguagaa

SEQ ID NO: 4484 - RNA, 23 nt, artificial
  siRNA Oligomer
cucugggcuuuucugggaauuga

SEQ ID NO: 4485 - RNA, 23 nt, artificial
  siRNA Oligomer
aacugucuguccaaaucaaagca

SEQ ID NO: 4486 - RNA, 23 nt, artificial
  siRNA Oligomer
gaacugucuguccaaaucaaagc

SEQ ID NO: 4487 - RNA, 23 nt, artificial
  siRNA Oligomer
agaacugucuguccaaaucaaag

SEQ ID NO: 4488 - RNA, 23 nt, artificial
  siRNA Oligomer
gagaacugucuguccaaaucaaa

SEQ ID NO: 4489 - RNA, 23 nt, artificial
  siRNA Oligomer
gaaggguccuaaaaagggaaaau

SEQ ID NO: 4490 - RNA, 23 nt, artificial
  siRNA Oligomer
ugaaggguccuaaaaagggaaaa

SEQ ID NO: 4491 - RNA, 23 nt, artificial
  siRNA Oligomer
uugaaggguccuaaaaagggaaa

SEQ ID NO: 4492 - RNA, 23 nt, artificial
  siRNA Oligomer
auugaaggguccuaaaaagggaa

SEQ ID NO: 4493 - RNA, 23 nt, artificial
  siRNA Oligomer
aaagcuuaacccuagguaagagu

SEQ ID NO: 4494 - RNA, 23 nt, artificial
  siRNA Oligomer
uaaagcuuaacccuagguaagag

SEQ ID NO: 4495 - RNA, 23 nt, artificial
  siRNA Oligomer
uuaaagcuuaacccuagguaaga

SEQ ID NO: 4496 - RNA, 23 nt, artificial
  siRNA Oligomer
auuaaagcuuaacccuagguaag

SEQ ID NO: 4497 - RNA, 23 nt, artificial
  siRNA Oligomer
aauuaaagcuuaacccuagguaa

SEQ ID NO: 4498 - RNA, 23 nt, artificial
  siRNA Oligomer
acaugugcuuaaucucagaugaa

SEQ ID NO: 4499 - RNA, 23 nt, artificial
  siRNA Oligomer
uacaugugcuuaaucucagauga

SEQ ID NO: 4500 - RNA, 23 nt, artificial
  siRNA Oligomer
uuacaugugcuuaaucucagaug

SEQ ID NO: 4501 - RNA, 23 nt, artificial
  siRNA Oligomer
auuacaugugcuuaaucucagau

SEQ ID NO: 4502 - RNA, 23 nt, artificial
  siRNA Oligomer
uauuacaugugcuuaaucucaga

SEQ ID NO: 4503 - RNA, 23 nt, artificial
  siRNA Oligomer
gaaucaacuugccagaauuuggu

SEQ ID NO: 4504 - RNA, 23 nt, artificial
  siRNA Oligomer
ggaaucaacuugccagaauuugg

SEQ ID NO: 4505 - RNA, 23 nt, artificial
  siRNA Oligomer
aggaaucaacuugccagaauuug

SEQ ID NO: 4506 - RNA, 23 nt, artificial
  siRNA Oligomer
gaggaaucaacuugccagaauuu

SEQ ID NO: 4507 - RNA, 23 nt, artificial
  siRNA Oligomer
ugaggaaucaacuugccagaauu

SEQ ID NO: 4508 - RNA, 23 nt, artificial
  siRNA Oligomer
uccucacucuaauguuuuaaaga

SEQ ID NO: 4509 - RNA, 23 nt, artificial
  siRNA Oligomer
uuccucacucuaauguuuuaaag

SEQ ID NO: 4510 - RNA, 23 nt, artificial
  siRNA Oligomer
cuuccucacucuaauguuuuaaa

SEQ ID NO: 4511 - RNA, 23 nt, artificial
  siRNA Oligomer
acuuccucacucuaauguuuuaa

SEQ ID NO: 4512 - RNA, 23 nt, artificial
  siRNA Oligomer
gacuuccucacucuaauguuuua

SEQ ID NO: 4513 - RNA, 23 nt, artificial
  siRNA Oligomer
gaaagauacuacaaagccaaucu

SEQ ID NO: 4514 - RNA, 23 nt, artificial
  siRNA Oligomer
ggaaagauacuacaaagccaauc

SEQ ID NO: 4515 - RNA, 23 nt, artificial
  siRNA Oligomer
uggaaagauacuacaaagccaau

SEQ ID NO: 4516 - RNA, 23 nt, artificial
  siRNA Oligomer
uuggaaagauacuacaaagccaa

SEQ ID NO: 4517 - RNA, 23 nt, artificial
  siRNA Oligomer
aaggguuuuuagacaggaaggua

SEQ ID NO: 4518 - RNA, 23 nt, artificial
  siRNA Oligomer
gaaggguuuuuagacaggaaggu

SEQ ID NO: 4519 - RNA, 23 nt, artificial
  siRNA Oligomer
ugaaggguuuuuagacaggaagg

SEQ ID NO: 4520 - RNA, 23 nt, artificial
  siRNA Oligomer
uugaaggguuuuuagacaggaag

SEQ ID NO: 4521 - RNA, 23 nt, artificial
  siRNA Oligomer
uuugaaggguuuuuagacaggaa

SEQ ID NO: 4522 - RNA, 23 nt, artificial
  siRNA Oligomer
guauucauccugguguuacugaa

SEQ ID NO: 4523 - RNA, 23 nt, artificial
  siRNA Oligomer
ccuguuacugauacuauaaguga

SEQ ID NO: 4524 - RNA, 23 nt, artificial
  siRNA Oligomer
ggagauaugguuuauaguacagc

SEQ ID NO: 4525 - RNA, 23 nt, artificial
  siRNA Oligomer
uggagauaugguuuauaguacag

SEQ ID NO: 4526 - RNA, 23 nt, artificial
  siRNA Oligomer
auggagauaugguuuauaguaca

SEQ ID NO: 4527 - RNA, 23 nt, artificial
  siRNA Oligomer
uauggagauaugguuuauaguac

SEQ ID NO: 4528 - RNA, 23 nt, artificial
  siRNA Oligomer
cuauggagauaugguuuauagua

SEQ ID NO: 4529 - RNA, 23 nt, artificial
  siRNA Oligomer
cauagaucccauuuuuguacaga

SEQ ID NO: 4530 - RNA, 23 nt, artificial
  siRNA Oligomer
gcauagaucccauuuuuguacag

SEQ ID NO: 4531 - RNA, 23 nt, artificial
  siRNA Oligomer
ugcauagaucccauuuuuguaca

SEQ ID NO: 4532 - RNA, 23 nt, artificial
  siRNA Oligomer
cugcauagaucccauuuuuguac

SEQ ID NO: 4533 - RNA, 23 nt, artificial
  siRNA Oligomer
ucugcauagaucccauuuuugua

SEQ ID NO: 4534 - RNA, 23 nt, artificial
  siRNA Oligomer
gaauugaaugggauggaauaggu

SEQ ID NO: 4535 - RNA, 23 nt, artificial
  siRNA Oligomer
agaauugaaugggauggaauagg

SEQ ID NO: 4536 - RNA, 23 nt, artificial
  siRNA Oligomer
cagaauugaaugggauggaauag

SEQ ID NO: 4537 - RNA, 23 nt, artificial
  siRNA Oligomer
acagaauugaaugggauggaaua

SEQ ID NO: 4538 - RNA, 23 nt, artificial
  siRNA Oligomer
cugugaggauaggaaauuaguuc

SEQ ID NO: 4539 - RNA, 23 nt, artificial
  siRNA Oligomer
ccugugaggauaggaaauuaguu

SEQ ID NO: 4540 - RNA, 23 nt, artificial
  siRNA Oligomer
accugugaggauaggaaauuagu

SEQ ID NO: 4541 - RNA, 23 nt, artificial
  siRNA Oligomer
uaccugugaggauaggaaauuag

SEQ ID NO: 4542 - RNA, 23 nt, artificial
  siRNA Oligomer
auaccugugaggauaggaaauua

SEQ ID NO: 4543 - RNA, 23 nt, artificial
  siRNA Oligomer
acccuagguaagaguaaaugaga

SEQ ID NO: 4544 - RNA, 23 nt, artificial
  siRNA Oligomer
aacccuagguaagaguaaaugag

SEQ ID NO: 4545 - RNA, 23 nt, artificial
  siRNA Oligomer
uaacccuagguaagaguaaauga

SEQ ID NO: 4546 - RNA, 23 nt, artificial
  siRNA Oligomer
ucaaaugcuuggaaagauacuac

SEQ ID NO: 4547 - RNA, 23 nt, artificial
  siRNA Oligomer
uucaaaugcuuggaaagauacua

SEQ ID NO: 4548 - RNA, 23 nt, artificial
  siRNA Oligomer
cuucaaaugcuuggaaagauacu

SEQ ID NO: 4549 - RNA, 23 nt, artificial
  siRNA Oligomer
ucuucaaaugcuuggaaagauac

SEQ ID NO: 4550 - RNA, 23 nt, artificial
  siRNA Oligomer
cucuucaaaugcuuggaaagaua

SEQ ID NO: 4551 - RNA, 23 nt, artificial
  siRNA Oligomer
ggagaagugauucaaaauagugu

SEQ ID NO: 4552 - RNA, 23 nt, artificial
  siRNA Oligomer
uggagaagugauucaaaauagug

SEQ ID NO: 4553 - RNA, 23 nt, artificial
  siRNA Oligomer
uuggagaagugauucaaaauagu

SEQ ID NO: 4554 - RNA, 23 nt, artificial
  siRNA Oligomer
uuuggagaagugauucaaaauag

SEQ ID NO: 4555 - RNA, 23 nt, artificial
  siRNA Oligomer
cuuuggagaagugauucaaaaua

SEQ ID NO: 4556 - RNA, 23 nt, artificial
  siRNA Oligomer
cguggauaaggagcuuauucagg

SEQ ID NO: 4557 - RNA, 23 nt, artificial
  siRNA Oligomer
ucguggauaaggagcuuauucag

SEQ ID NO: 4558 - RNA, 23 nt, artificial
  siRNA Oligomer
gucguggauaaggagcuuauuca

SEQ ID NO: 4559 - RNA, 23 nt, artificial
  siRNA Oligomer
ggucguggauaaggagcuuauuc

SEQ ID NO: 4560 - RNA, 23 nt, artificial
  siRNA Oligomer
gggucguggauaaggagcuuauu

SEQ ID NO: 4561 - RNA, 23 nt, artificial
  siRNA Oligomer
ccagauuugccuauuuugauuuu

SEQ ID NO: 4562 - RNA, 23 nt, artificial
  siRNA Oligomer
accagauuugccuauuuugauuu

SEQ ID NO: 4563 - RNA, 23 nt, artificial
  siRNA Oligomer
aaccagauuugccuauuuugauu

SEQ ID NO: 4564 - RNA, 23 nt, artificial
  siRNA Oligomer
aaaccagauuugccuauuuugau

SEQ ID NO: 4565 - RNA, 23 nt, artificial
  siRNA Oligomer
uaaaccagauuugccuauuuuga

SEQ ID NO: 4566 - RNA, 23 nt, artificial
  siRNA Oligomer
ccuuuggagaagugauucaaaau

SEQ ID NO: 4567 - RNA, 23 nt, artificial
  siRNA Oligomer
gccuuuggagaagugauucaaaa

SEQ ID NO: 4568 - RNA, 23 nt, artificial
  siRNA Oligomer
uugaggaaucaacuugccagaau

SEQ ID NO: 4569 - RNA, 23 nt, artificial
  siRNA Oligomer
uuugaggaaucaacuugccagaa

SEQ ID NO: 4570 - RNA, 23 nt, artificial
  siRNA Oligomer
auuugaggaaucaacuugccaga

SEQ ID NO: 4571 - RNA, 23 nt, artificial
  siRNA Oligomer
gagaaauauuacggcaauaaugg

SEQ ID NO: 4572 - RNA, 23 nt, artificial
  siRNA Oligomer
ugagaaauauuacggcaauaaug

SEQ ID NO: 4573 - RNA, 23 nt, artificial
  siRNA Oligomer
augagaaauauuacggcaauaau

SEQ ID NO: 4574 - RNA, 23 nt, artificial
  siRNA Oligomer
aaugagaaauauuacggcaauaa

SEQ ID NO: 4575 - RNA, 23 nt, artificial
  siRNA Oligomer
aaaugagaaauauuacggcaaua

SEQ ID NO: 4576 - RNA, 23 nt, artificial
  siRNA Oligomer
uacagaauugaaugggauggaau

SEQ ID NO: 4577 - RNA, 23 nt, artificial
  siRNA Oligomer
guacagaauugaaugggauggaa

SEQ ID NO: 4578 - RNA, 23 nt, artificial
  siRNA Oligomer
auggaauagguaagcaaaaguag

SEQ ID NO: 4579 - RNA, 23 nt, artificial
  siRNA Oligomer
guaaaaagcuggauaggauugug

SEQ ID NO: 4580 - RNA, 23 nt, artificial
  siRNA Oligomer
uguaaaaagcuggauaggauugu

SEQ ID NO: 4581 - RNA, 23 nt, artificial
  siRNA Oligomer
auguaaaaagcuggauaggauug

SEQ ID NO: 4582 - RNA, 23 nt, artificial
  siRNA Oligomer
uauguaaaaagcuggauaggauu

SEQ ID NO: 4583 - RNA, 23 nt, artificial
  siRNA Oligomer
guauguaaaaagcuggauaggau

SEQ ID NO: 4584 - RNA, 23 nt, artificial
  siRNA Oligomer
ccaccaguuccugacucaaauuu

SEQ ID NO: 4585 - RNA, 23 nt, artificial
  siRNA Oligomer
accaccaguuccugacucaaauu

SEQ ID NO: 4586 - RNA, 23 nt, artificial
  siRNA Oligomer
caccaccaguuccugacucaaau

SEQ ID NO: 4587 - RNA, 23 nt, artificial
  siRNA Oligomer
acaccaccaguuccugacucaaa

SEQ ID NO: 4588 - RNA, 23 nt, artificial
  siRNA Oligomer
cacaccaccaguuccugacucaa

SEQ ID NO: 4589 - RNA, 23 nt, artificial
  siRNA Oligomer
caaauuagccaguguucuaacaa

SEQ ID NO: 4590 - RNA, 23 nt, artificial
  siRNA Oligomer
ucaaauuagccaguguucuaaca

SEQ ID NO: 4591 - RNA, 23 nt, artificial
  siRNA Oligomer
uucaaauuagccaguguucuaac

SEQ ID NO: 4592 - RNA, 23 nt, artificial
  siRNA Oligomer
guucaaauuagccaguguucuaa

SEQ ID NO: 4593 - RNA, 23 nt, artificial
  siRNA Oligomer
uguucaaauuagccaguguucua

SEQ ID NO: 4594 - RNA, 23 nt, artificial
  siRNA Oligomer
caccugcccuaaauaagaaaccc

SEQ ID NO: 4595 - RNA, 23 nt, artificial
  siRNA Oligomer
cucacugauuggaacaacaguga

SEQ ID NO: 4596 - RNA, 23 nt, artificial
  siRNA Oligomer
acucacugauuggaacaacagug

SEQ ID NO: 4597 - RNA, 23 nt, artificial
  siRNA Oligomer
uacucacugauuggaacaacagu

SEQ ID NO: 4598 - RNA, 23 nt, artificial
  siRNA Oligomer
uuacucacugauuggaacaacag

SEQ ID NO: 4599 - RNA, 23 nt, artificial
  siRNA Oligomer
uuuacucacugauuggaacaaca

SEQ ID NO: 4600 - RNA, 23 nt, artificial
  siRNA Oligomer
augcuggagaacugucuguccaa

SEQ ID NO: 4601 - RNA, 23 nt, artificial
  siRNA Oligomer
uuuauagaauugggccaagauaa

SEQ ID NO: 4602 - RNA, 23 nt, artificial
  siRNA Oligomer
acucuucaaaugcuuggaaagau

SEQ ID NO: 4603 - RNA, 23 nt, artificial
  siRNA Oligomer
aacucuucaaaugcuuggaaaga

SEQ ID NO: 4604 - RNA, 23 nt, artificial
  siRNA Oligomer
aaacucuucaaaugcuuggaaag

SEQ ID NO: 4605 - RNA, 23 nt, artificial
  siRNA Oligomer
uaaacucuucaaaugcuuggaaa

SEQ ID NO: 4606 - RNA, 23 nt, artificial
  siRNA Oligomer
ucuuggugacuuccucacucuaa

SEQ ID NO: 4607 - RNA, 23 nt, artificial
  siRNA Oligomer
gagaacugcucauggacuagcuu

SEQ ID NO: 4608 - RNA, 23 nt, artificial
  siRNA Oligomer
ggagaacugcucauggacuagcu

SEQ ID NO: 4609 - RNA, 23 nt, artificial
  siRNA Oligomer
aggagaacugcucauggacuagc

SEQ ID NO: 4610 - RNA, 23 nt, artificial
  siRNA Oligomer
caggagaacugcucauggacuag

SEQ ID NO: 4611 - RNA, 23 nt, artificial
  siRNA Oligomer
gcaggagaacugcucauggacua

SEQ ID NO: 4612 - RNA, 23 nt, artificial
  siRNA Oligomer
ugugggucguggauaaggagcuu

SEQ ID NO: 4613 - RNA, 23 nt, artificial
  siRNA Oligomer
cugugggucguggauaaggagcu

SEQ ID NO: 4614 - RNA, 23 nt, artificial
  siRNA Oligomer
gcugugggucguggauaaggagc

SEQ ID NO: 4615 - RNA, 23 nt, artificial
  siRNA Oligomer
gugaccuaaaaugucacuguuca

SEQ ID NO: 4616 - RNA, 23 nt, artificial
  siRNA Oligomer
gagaaacugacccagagaauugc

SEQ ID NO: 4617 - RNA, 23 nt, artificial
  siRNA Oligomer
ugagaaacugacccagagaauug

SEQ ID NO: 4618 - RNA, 23 nt, artificial
  siRNA Oligomer
cugagaaacugacccagagaauu

SEQ ID NO: 4619 - RNA, 23 nt, artificial
  siRNA Oligomer
ccugagaaacugacccagagaau

SEQ ID NO: 4620 - RNA, 23 nt, artificial
  siRNA Oligomer
cccugagaaacugacccagagaa

SEQ ID NO: 4621 - RNA, 23 nt, artificial
  siRNA Oligomer
caccaguuccugacucaaauuug

SEQ ID NO: 4622 - RNA, 23 nt, artificial
  siRNA Oligomer
ucaaagguccuugucccugagaa

SEQ ID NO: 4623 - RNA, 23 nt, artificial
  siRNA Oligomer
cucaaagguccuugucccugaga

SEQ ID NO: 4624 - RNA, 23 nt, artificial
  siRNA Oligomer
gcucaaagguccuugucccugag

SEQ ID NO: 4625 - RNA, 23 nt, artificial
  siRNA Oligomer
ugcucaaagguccuugucccuga

SEQ ID NO: 4626 - RNA, 23 nt, artificial
  siRNA Oligomer
gauuucgacuuguuaagaaaaaa

SEQ ID NO: 4627 - RNA, 23 nt, artificial
  siRNA Oligomer
ggauuucgacuuguuaagaaaaa

SEQ ID NO: 4628 - RNA, 23 nt, artificial
  siRNA Oligomer
aggauuucgacuuguuaagaaaa

SEQ ID NO: 4629 - RNA, 23 nt, artificial
  siRNA Oligomer
ugagugaaugaugaauaccugug

SEQ ID NO: 4630 - RNA, 23 nt, artificial
  siRNA Oligomer
uugagugaaugaugaauaccugu

SEQ ID NO: 4631 - RNA, 23 nt, artificial
  siRNA Oligomer
auugagugaaugaugaauaccug

SEQ ID NO: 4632 - RNA, 23 nt, artificial
  siRNA Oligomer
cauugagugaaugaugaauaccu

SEQ ID NO: 4633 - RNA, 23 nt, artificial
  siRNA Oligomer
caauaauggaacugcuucacugu

SEQ ID NO: 4634 - RNA, 23 nt, artificial
  siRNA Oligomer
gcaauaauggaacugcuucacug

SEQ ID NO: 4635 - RNA, 23 nt, artificial
  siRNA Oligomer
ggcaauaauggaacugcuucacu

SEQ ID NO: 4636 - RNA, 23 nt, artificial
  siRNA Oligomer
cggcaauaauggaacugcuucac

SEQ ID NO: 4637 - RNA, 23 nt, artificial
  siRNA Oligomer
acggcaauaauggaacugcuuca

SEQ ID NO: 4638 - RNA, 23 nt, artificial
  siRNA Oligomer
cacuaacaguuaucuuugacucu

SEQ ID NO: 4639 - RNA, 23 nt, artificial
  siRNA Oligomer
ccacuaacaguuaucuuugacuc

SEQ ID NO: 4640 - RNA, 23 nt, artificial
  siRNA Oligomer
uccacuaacaguuaucuuugacu

SEQ ID NO: 4641 - RNA, 23 nt, artificial
  siRNA Oligomer
uuccacuaacaguuaucuuugac

SEQ ID NO: 4642 - RNA, 23 nt, artificial
  siRNA Oligomer
uuuccacuaacaguuaucuuuga

SEQ ID NO: 4643 - RNA, 23 nt, artificial
  siRNA Oligomer
gcgucguaccuacuuuugagcuu

SEQ ID NO: 4644 - RNA, 23 nt, artificial
  siRNA Oligomer
agcgucguaccuacuuuugagcu

SEQ ID NO: 4645 - RNA, 23 nt, artificial
  siRNA Oligomer
uagcgucguaccuacuuuugagc

SEQ ID NO: 4646 - RNA, 23 nt, artificial
  siRNA Oligomer
cuagcgucguaccuacuuuugag

SEQ ID NO: 4647 - RNA, 23 nt, artificial
  siRNA Oligomer
ucuagcgucguaccuacuuuuga

SEQ ID NO: 4648 - RNA, 23 nt, artificial
  siRNA Oligomer
cggccagcauuucagaauugcug

SEQ ID NO: 4649 - RNA, 23 nt, artificial
  siRNA Oligomer
ccggccagcauuucagaauugcu

SEQ ID NO: 4650 - RNA, 23 nt, artificial
  siRNA Oligomer
cccggccagcauuucagaauugc

SEQ ID NO: 4651 - RNA, 23 nt, artificial
  siRNA Oligomer
acccggccagcauuucagaauug

SEQ ID NO: 4652 - RNA, 23 nt, artificial
  siRNA Oligomer
aacccggccagcauuucagaauu

SEQ ID NO: 4653 - RNA, 23 nt, artificial
  siRNA Oligomer
gugcuuaaucucagaugaaccau

SEQ ID NO: 4654 - RNA, 23 nt, artificial
  siRNA Oligomer
ugugcuuaaucucagaugaacca

SEQ ID NO: 4655 - RNA, 23 nt, artificial
  siRNA Oligomer
augugcuuaaucucagaugaacc

SEQ ID NO: 4656 - RNA, 23 nt, artificial
  siRNA Oligomer
caugugcuuaaucucagaugaac

SEQ ID NO: 4657 - RNA, 23 nt, artificial
  siRNA Oligomer
gaauagguaagcaaaaguagaag

SEQ ID NO: 4658 - RNA, 23 nt, artificial
  siRNA Oligomer
ggaauagguaagcaaaaguagaa

SEQ ID NO: 4659 - RNA, 23 nt, artificial
  siRNA Oligomer
uggaauagguaagcaaaaguaga

SEQ ID NO: 4660 - RNA, 23 nt, artificial
  siRNA Oligomer
guuguguuaugcacgugaacuug

SEQ ID NO: 4661 - RNA, 23 nt, artificial
  siRNA Oligomer
gguuguguuaugcacgugaacuu

SEQ ID NO: 4662 - RNA, 23 nt, artificial
  siRNA Oligomer
agguuguguuaugcacgugaacu

SEQ ID NO: 4663 - RNA, 23 nt, artificial
  siRNA Oligomer
gagguuguguuaugcacgugaac

SEQ ID NO: 4664 - RNA, 23 nt, artificial
  siRNA Oligomer
cgagguuguguuaugcacgugaa

SEQ ID NO: 4665 - RNA, 23 nt, artificial
  siRNA Oligomer
aguacagccuagagaaugaaacu

SEQ ID NO: 4666 - RNA, 23 nt, artificial
  siRNA Oligomer
uaguacagccuagagaaugaaac

SEQ ID NO: 4667 - RNA, 23 nt, artificial
  siRNA Oligomer
auaguacagccuagagaaugaaa

SEQ ID NO: 4668 - RNA, 23 nt, artificial
  siRNA Oligomer
uauaguacagccuagagaaugaa

SEQ ID NO: 4669 - RNA, 23 nt, artificial
  siRNA Oligomer
uuauaguacagccuagagaauga

SEQ ID NO: 4670 - RNA, 23 nt, artificial
  siRNA Oligomer
acugucuguccaaaucaaagcaa

SEQ ID NO: 4671 - RNA, 23 nt, artificial
  siRNA Oligomer
agcuuacacuuguguuuaagcag

SEQ ID NO: 4672 - RNA, 23 nt, artificial
  siRNA Oligomer
gagcuuacacuuguguuuaagca

SEQ ID NO: 4673 - RNA, 23 nt, artificial
  siRNA Oligomer
ugagcuuacacuuguguuuaagc

SEQ ID NO: 4674 - RNA, 23 nt, artificial
  siRNA Oligomer
uugagcuuacacuuguguuuaag

SEQ ID NO: 4675 - RNA, 23 nt, artificial
  siRNA Oligomer
uuugagcuuacacuuguguuuaa

SEQ ID NO: 4676 - RNA, 23 nt, artificial
  siRNA Oligomer
gauuggguaguaaaacuauucag

SEQ ID NO: 4677 - RNA, 23 nt, artificial
  siRNA Oligomer
ugauuggguaguaaaacuauuca

SEQ ID NO: 4678 - RNA, 23 nt, artificial
  siRNA Oligomer
augauuggguaguaaaacuauuc

SEQ ID NO: 4679 - RNA, 23 nt, artificial
  siRNA Oligomer
caugauuggguaguaaaacuauu

SEQ ID NO: 4680 - RNA, 23 nt, artificial
  siRNA Oligomer
gugaacuuggaaauugaaaaugu

SEQ ID NO: 4681 - RNA, 23 nt, artificial
  siRNA Oligomer
gccagaauuugguuaaaaugcug

SEQ ID NO: 4682 - RNA, 23 nt, artificial
  siRNA Oligomer
ugccagaauuugguuaaaaugcu

SEQ ID NO: 4683 - RNA, 23 nt, artificial
  siRNA Oligomer
uugccagaauuugguuaaaaugc

SEQ ID NO: 4684 - RNA, 23 nt, artificial
  siRNA Oligomer
cuugccagaauuugguuaaaaug

SEQ ID NO: 4685 - RNA, 23 nt, artificial
  siRNA Oligomer
acuugccagaauuugguuaaaau

SEQ ID NO: 4686 - RNA, 23 nt, artificial
  siRNA Oligomer
aacuggcaguuugagcagcaaga

SEQ ID NO: 4687 - RNA, 23 nt, artificial
  siRNA Oligomer
caacuggcaguuugagcagcaag

SEQ ID NO: 4688 - RNA, 23 nt, artificial
  siRNA Oligomer
gcaacuggcaguuugagcagcaa

SEQ ID NO: 4689 - RNA, 23 nt, artificial
  siRNA Oligomer
gucacuagggaauaauaaaggcc

SEQ ID NO: 4690 - RNA, 23 nt, artificial
  siRNA Oligomer
ugucacuagggaauaauaaaggc

SEQ ID NO: 4691 - RNA, 23 nt, artificial
  siRNA Oligomer
agaucuagucccucucugauuca

SEQ ID NO: 4692 - RNA, 23 nt, artificial
  siRNA Oligomer
gagaucuagucccucucugauuc

SEQ ID NO: 4693 - RNA, 23 nt, artificial
  siRNA Oligomer
ugagaucuagucccucucugauu

SEQ ID NO: 4694 - RNA, 23 nt, artificial
  siRNA Oligomer
cugagaucuagucccucucugau

SEQ ID NO: 4695 - RNA, 23 nt, artificial
  siRNA Oligomer
ucugagaucuagucccucucuga

SEQ ID NO: 4696 - RNA, 23 nt, artificial
  siRNA Oligomer
ggcuucuugggcaucgauguaga

SEQ ID NO: 4697 - RNA, 23 nt, artificial
  siRNA Oligomer
ccagagaauugcucaagaugucc

SEQ ID NO: 4698 - RNA, 23 nt, artificial
  siRNA Oligomer
cccagagaauugcucaagauguc

SEQ ID NO: 4699 - RNA, 23 nt, artificial
  siRNA Oligomer
acccagagaauugcucaagaugu

SEQ ID NO: 4700 - RNA, 23 nt, artificial
  siRNA Oligomer
gacccagagaauugcucaagaug

SEQ ID NO: 4701 - RNA, 23 nt, artificial
  siRNA Oligomer
ugacccagagaauugcucaagau

SEQ ID NO: 4702 - RNA, 23 nt, artificial
  siRNA Oligomer
cccuguucuuaaguguugaauac

SEQ ID NO: 4703 - RNA, 23 nt, artificial
  siRNA Oligomer
ccccuguucuuaaguguugaaua

SEQ ID NO: 4704 - RNA, 23 nt, artificial
  siRNA Oligomer
uccccuguucuuaaguguugaau

SEQ ID NO: 4705 - RNA, 23 nt, artificial
  siRNA Oligomer
uuccccuguucuuaaguguugaa

SEQ ID NO: 4706 - RNA, 23 nt, artificial
  siRNA Oligomer
uuuccccuguucuuaaguguuga

SEQ ID NO: 4707 - RNA, 23 nt, artificial
  siRNA Oligomer
cugacccagagaauugcucaaga

SEQ ID NO: 4708 - RNA, 23 nt, artificial
  siRNA Oligomer
acugacccagagaauugcucaag

SEQ ID NO: 4709 - RNA, 23 nt, artificial
  siRNA Oligomer
aacugacccagagaauugcucaa

SEQ ID NO: 4710 - RNA, 23 nt, artificial
  siRNA Oligomer
ggccuuuggagaagugauucaaa

SEQ ID NO: 4711 - RNA, 23 nt, artificial
  siRNA Oligomer
ccauggcaguguuaucucaucuc

SEQ ID NO: 4712 - RNA, 23 nt, artificial
  siRNA Oligomer
accauggcaguguuaucucaucu

SEQ ID NO: 4713 - RNA, 23 nt, artificial
  siRNA Oligomer
caccauggcaguguuaucucauc

SEQ ID NO: 4714 - RNA, 23 nt, artificial
  siRNA Oligomer
ucaccauggcaguguuaucucau

SEQ ID NO: 4715 - RNA, 23 nt, artificial
  siRNA Oligomer
uucaccauggcaguguuaucuca

SEQ ID NO: 4716 - RNA, 23 nt, artificial
  siRNA Oligomer
cagcucaggauuucgacuuguua

SEQ ID NO: 4717 - RNA, 23 nt, artificial
  siRNA Oligomer
gacaggaagguaggauuaaguag

SEQ ID NO: 4718 - RNA, 23 nt, artificial
  siRNA Oligomer
agacaggaagguaggauuaagua

SEQ ID NO: 4719 - RNA, 23 nt, artificial
  siRNA Oligomer
uagacaggaagguaggauuaagu

SEQ ID NO: 4720 - RNA, 23 nt, artificial
  siRNA Oligomer
uuagacaggaagguaggauuaag

SEQ ID NO: 4721 - RNA, 23 nt, artificial
  siRNA Oligomer
uuuagacaggaagguaggauuaa

SEQ ID NO: 4722 - RNA, 23 nt, artificial
  siRNA Oligomer
ggguccuaaaaagggaaaauaua

SEQ ID NO: 4723 - RNA, 23 nt, artificial
  siRNA Oligomer
aggguccuaaaaagggaaaauau

SEQ ID NO: 4724 - RNA, 23 nt, artificial
  siRNA Oligomer
aaggguccuaaaaagggaaaaua

SEQ ID NO: 4725 - RNA, 23 nt, artificial
  siRNA Oligomer
ggauaaggagcuuauucagguuu

SEQ ID NO: 4726 - RNA, 23 nt, artificial
  siRNA Oligomer
uggauaaggagcuuauucagguu

SEQ ID NO: 4727 - RNA, 23 nt, artificial
  siRNA Oligomer
guggauaaggagcuuauucaggu

SEQ ID NO: 4728 - RNA, 23 nt, artificial
  siRNA Oligomer
cuuauggaaggcuguuaaauuaa

SEQ ID NO: 4729 - RNA, 23 nt, artificial
  siRNA Oligomer
cgaaggaaacagagccguugacc

SEQ ID NO: 4730 - RNA, 23 nt, artificial
  siRNA Oligomer
gcgaaggaaacagagccguugac

SEQ ID NO: 4731 - RNA, 23 nt, artificial
  siRNA Oligomer
cgcgaaggaaacagagccguuga

SEQ ID NO: 4732 - RNA, 23 nt, artificial
  siRNA Oligomer
ucgcgaaggaaacagagccguug

SEQ ID NO: 4733 - RNA, 23 nt, artificial
  siRNA Oligomer
cucgcgaaggaaacagagccguu

SEQ ID NO: 4734 - RNA, 23 nt, artificial
  siRNA Oligomer
guucuaacaaacuaaacucuuca

SEQ ID NO: 4735 - RNA, 23 nt, artificial
  siRNA Oligomer
uguucuaacaaacuaaacucuuc

SEQ ID NO: 4736 - RNA, 23 nt, artificial
  siRNA Oligomer
ccuguucuuaaguguugaauacu

SEQ ID NO: 4737 - RNA, 23 nt, artificial
  siRNA Oligomer
ggccuuauuuuuugucuuauucc

SEQ ID NO: 4738 - RNA, 23 nt, artificial
  siRNA Oligomer
aggccuuauuuuuugucuuauuc

SEQ ID NO: 4739 - RNA, 23 nt, artificial
  siRNA Oligomer
aaggccuuauuuuuugucuuauu

SEQ ID NO: 4740 - RNA, 23 nt, artificial
  siRNA Oligomer
aaaggccuuauuuuuugucuuau

SEQ ID NO: 4741 - RNA, 23 nt, artificial
  siRNA Oligomer
uaaaggccuuauuuuuugucuua

SEQ ID NO: 4742 - RNA, 23 nt, artificial
  siRNA Oligomer
cucucugauucacuuaguaaucu

SEQ ID NO: 4743 - RNA, 23 nt, artificial
  siRNA Oligomer
ccucucugauucacuuaguaauc

SEQ ID NO: 4744 - RNA, 23 nt, artificial
  siRNA Oligomer
cccucucugauucacuuaguaau

SEQ ID NO: 4745 - RNA, 23 nt, artificial
  siRNA Oligomer
ucccucucugauucacuuaguaa

SEQ ID NO: 4746 - RNA, 23 nt, artificial
  siRNA Oligomer
gucccucucugauucacuuagua

SEQ ID NO: 4747 - RNA, 23 nt, artificial
  siRNA Oligomer
gcaucgauguagaacuguugucc

SEQ ID NO: 4748 - RNA, 23 nt, artificial
  siRNA Oligomer
ggcaucgauguagaacuguuguc

SEQ ID NO: 4749 - RNA, 23 nt, artificial
  siRNA Oligomer
gggcaucgauguagaacuguugu

SEQ ID NO: 4750 - RNA, 23 nt, artificial
  siRNA Oligomer
ugggcaucgauguagaacuguug

SEQ ID NO: 4751 - RNA, 23 nt, artificial
  siRNA Oligomer
uugggcaucgauguagaacuguu

SEQ ID NO: 4752 - RNA, 23 nt, artificial
  siRNA Oligomer
cgucguaccuacuuuugagcuua

SEQ ID NO: 4753 - RNA, 23 nt, artificial
  siRNA Oligomer
gaaugaaacucaccguccagaua

SEQ ID NO: 4754 - RNA, 23 nt, artificial
  siRNA Oligomer
agaaugaaacucaccguccagau

SEQ ID NO: 4755 - RNA, 23 nt, artificial
  siRNA Oligomer
gagaaugaaacucaccguccaga

SEQ ID NO: 4756 - RNA, 23 nt, artificial
  siRNA Oligomer
agagaaugaaacucaccguccag

SEQ ID NO: 4757 - RNA, 23 nt, artificial
  siRNA Oligomer
uagagaaugaaacucaccgucca

SEQ ID NO: 4758 - RNA, 23 nt, artificial
  siRNA Oligomer
gucuauuguuaagcuccaaaggu

SEQ ID NO: 4759 - RNA, 23 nt, artificial
  siRNA Oligomer
ugucuauuguuaagcuccaaagg

SEQ ID NO: 4760 - RNA, 23 nt, artificial
  siRNA Oligomer
augucuauuguuaagcuccaaag

SEQ ID NO: 4761 - RNA, 23 nt, artificial
  siRNA Oligomer
caugucuauuguuaagcuccaaa

SEQ ID NO: 4762 - RNA, 23 nt, artificial
  siRNA Oligomer
gcaugucuauuguuaagcuccaa

SEQ ID NO: 4763 - RNA, 23 nt, artificial
  siRNA Oligomer
caaccucaacgagguaauauuug

SEQ ID NO: 4764 - RNA, 23 nt, artificial
  siRNA Oligomer
ccaaccucaacgagguaauauuu

SEQ ID NO: 4765 - RNA, 23 nt, artificial
  siRNA Oligomer
cccaaccucaacgagguaauauu

SEQ ID NO: 4766 - RNA, 23 nt, artificial
  siRNA Oligomer
acccaaccucaacgagguaauau

SEQ ID NO: 4767 - RNA, 23 nt, artificial
  siRNA Oligomer
aacccaaccucaacgagguaaua

SEQ ID NO: 4768 - RNA, 23 nt, artificial
  siRNA Oligomer
gggccaagauaaaucaauguugu

SEQ ID NO: 4769 - RNA, 23 nt, artificial
  siRNA Oligomer
ugggccaagauaaaucaauguug

SEQ ID NO: 4770 - RNA, 23 nt, artificial
  siRNA Oligomer
uugggccaagauaaaucaauguu

SEQ ID NO: 4771 - RNA, 23 nt, artificial
  siRNA Oligomer
auugggccaagauaaaucaaugu

SEQ ID NO: 4772 - RNA, 23 nt, artificial
  siRNA Oligomer
aauugggccaagauaaaucaaug

SEQ ID NO: 4773 - RNA, 23 nt, artificial
  siRNA Oligomer
gguaggcuugguaauagacuaua

SEQ ID NO: 4774 - RNA, 23 nt, artificial
  siRNA Oligomer
gguaauauuugaggaaucaacuu

SEQ ID NO: 4775 - RNA, 23 nt, artificial
  siRNA Oligomer
agguaauauuugaggaaucaacu

SEQ ID NO: 4776 - RNA, 23 nt, artificial
  siRNA Oligomer
gagguaauauuugaggaaucaac

SEQ ID NO: 4777 - RNA, 23 nt, artificial
  siRNA Oligomer
uguauguaaaaagcuggauagga

SEQ ID NO: 4778 - RNA, 23 nt, artificial
  siRNA Oligomer
auguauguaaaaagcuggauagg

SEQ ID NO: 4779 - RNA, 23 nt, artificial
  siRNA Oligomer
aauguauguaaaaagcuggauag

SEQ ID NO: 4780 - RNA, 23 nt, artificial
  siRNA Oligomer
aaauguauguaaaaagcuggaua

SEQ ID NO: 4781 - RNA, 23 nt, artificial
  siRNA Oligomer
gaaacgggucaauuuacgaaguc

SEQ ID NO: 4782 - RNA, 23 nt, artificial
  siRNA Oligomer
ugaaacgggucaauuuacgaagu

SEQ ID NO: 4783 - RNA, 23 nt, artificial
  siRNA Oligomer
uugaaacgggucaauuuacgaag

SEQ ID NO: 4784 - RNA, 23 nt, artificial
  siRNA Oligomer
auugaaacgggucaauuuacgaa

SEQ ID NO: 4785 - RNA, 23 nt, artificial
  siRNA Oligomer
uauugaaacgggucaauuuacga

SEQ ID NO: 4786 - RNA, 23 nt, artificial
  siRNA Oligomer
guugcaacuggcaguuugagcag

SEQ ID NO: 4787 - RNA, 23 nt, artificial
  siRNA Oligomer
gguugcaacuggcaguuugagca

SEQ ID NO: 4788 - RNA, 23 nt, artificial
  siRNA Oligomer
ugguugcaacuggcaguuugagc

SEQ ID NO: 4789 - RNA, 23 nt, artificial
  siRNA Oligomer
augguugcaacuggcaguuugag

SEQ ID NO: 4790 - RNA, 23 nt, artificial
  siRNA Oligomer
caugguugcaacuggcaguuuga

SEQ ID NO: 4791 - RNA, 23 nt, artificial
  siRNA Oligomer
ccuagagaaugaaacucaccguc

SEQ ID NO: 4792 - RNA, 23 nt, artificial
  siRNA Oligomer
gccuagagaaugaaacucaccgu

SEQ ID NO: 4793 - RNA, 23 nt, artificial
  siRNA Oligomer
agccuagagaaugaaacucaccg

SEQ ID NO: 4794 - RNA, 23 nt, artificial
  siRNA Oligomer
cagccuagagaaugaaacucacc

SEQ ID NO: 4795 - RNA, 23 nt, artificial
  siRNA Oligomer
acagccuagagaaugaaacucac

SEQ ID NO: 4796 - RNA, 23 nt, artificial
  siRNA Oligomer
gccugcuaagugauuuugacuac

SEQ ID NO: 4797 - RNA, 23 nt, artificial
  siRNA Oligomer
agccugcuaagugauuuugacua

SEQ ID NO: 4798 - RNA, 23 nt, artificial
  siRNA Oligomer
gagccugcuaagugauuuugacu

SEQ ID NO: 4799 - RNA, 23 nt, artificial
  siRNA Oligomer
agagccugcuaagugauuuugac

SEQ ID NO: 4800 - RNA, 23 nt, artificial
  siRNA Oligomer
gagagccugcuaagugauuuuga

SEQ ID NO: 4801 - RNA, 23 nt, artificial
  siRNA Oligomer
cuauuagcuccacuucacaugcu

SEQ ID NO: 4802 - RNA, 23 nt, artificial
  siRNA Oligomer
gcuauuagcuccacuucacaugc

SEQ ID NO: 4803 - RNA, 23 nt, artificial
  siRNA Oligomer
agcuauuagcuccacuucacaug

SEQ ID NO: 4804 - RNA, 23 nt, artificial
  siRNA Oligomer
uagcuauuagcuccacuucacau

SEQ ID NO: 4805 - RNA, 23 nt, artificial
  siRNA Oligomer
cuagcuauuagcuccacuucaca

SEQ ID NO: 4806 - RNA, 23 nt, artificial
  siRNA Oligomer
caacagugauugaaggguccuaa

SEQ ID NO: 4807 - RNA, 23 nt, artificial
  siRNA Oligomer
ggguaguagcuguauacuaccac

SEQ ID NO: 4808 - RNA, 23 nt, artificial
  siRNA Oligomer
aggguaguagcuguauacuacca

SEQ ID NO: 4809 - RNA, 23 nt, artificial
  siRNA Oligomer
aaggguaguagcuguauacuacc

SEQ ID NO: 4810 - RNA, 23 nt, artificial
  siRNA Oligomer
ggauuaaguaggugaguuuaauu

SEQ ID NO: 4811 - RNA, 23 nt, artificial
  siRNA Oligomer
aggauuaaguaggugaguuuaau

SEQ ID NO: 4812 - RNA, 23 nt, artificial
  siRNA Oligomer
uaggauuaaguaggugaguuuaa

SEQ ID NO: 4813 - RNA, 23 nt, artificial
  siRNA Oligomer
guaggauuaaguaggugaguuua

SEQ ID NO: 4814 - RNA, 23 nt, artificial
  siRNA Oligomer
gguaggauuaaguaggugaguuu

SEQ ID NO: 4815 - RNA, 23 nt, artificial
  siRNA Oligomer
uguuguuuugcaugucuauuguu

SEQ ID NO: 4816 - RNA, 23 nt, artificial
  siRNA Oligomer
auguuguuuugcaugucuauugu

SEQ ID NO: 4817 - RNA, 23 nt, artificial
  siRNA Oligomer
aauguuguuuugcaugucuauug

SEQ ID NO: 4818 - RNA, 23 nt, artificial
  siRNA Oligomer
caauguuguuuugcaugucuauu

SEQ ID NO: 4819 - RNA, 23 nt, artificial
  siRNA Oligomer
ucaauguuguuuugcaugucuau

SEQ ID NO: 4820 - RNA, 23 nt, artificial
  siRNA Oligomer
guuccugacucaaauuugaaggg

SEQ ID NO: 4821 - RNA, 23 nt, artificial
  siRNA Oligomer
aguuccugacucaaauuugaagg

SEQ ID NO: 4822 - RNA, 23 nt, artificial
  siRNA Oligomer
caguuccugacucaaauuugaag

SEQ ID NO: 4823 - RNA, 23 nt, artificial
  siRNA Oligomer
ccaguuccugacucaaauuugaa

SEQ ID NO: 4824 - RNA, 23 nt, artificial
  siRNA Oligomer
accaguuccugacucaaauuuga

SEQ ID NO: 4825 - RNA, 23 nt, artificial
  siRNA Oligomer
aguaaccacgguguuguuuuaga

SEQ ID NO: 4826 - RNA, 23 nt, artificial
  siRNA Oligomer
caguaaccacgguguuguuuuag

SEQ ID NO: 4827 - RNA, 23 nt, artificial
  siRNA Oligomer
ucaguaaccacgguguuguuuua

SEQ ID NO: 4828 - RNA, 23 nt, artificial
  siRNA Oligomer
uucaguaaccacgguguuguuuu

SEQ ID NO: 4829 - RNA, 23 nt, artificial
  siRNA Oligomer
uuucaguaaccacgguguuguuu

SEQ ID NO: 4830 - RNA, 23 nt, artificial
  siRNA Oligomer
auuucaguaaccacgguguuguu

SEQ ID NO: 4831 - RNA, 23 nt, artificial
  siRNA Oligomer
agauuuuuuccaccuuggauacc

SEQ ID NO: 4832 - RNA, 23 nt, artificial
  siRNA Oligomer
cagauuuuuuccaccuuggauac

SEQ ID NO: 4833 - RNA, 23 nt, artificial
  siRNA Oligomer
ccagauuuuuuccaccuuggaua

SEQ ID NO: 4834 - RNA, 23 nt, artificial
  siRNA Oligomer
cccagauuuuuuccaccuuggau

SEQ ID NO: 4835 - RNA, 23 nt, artificial
  siRNA Oligomer
acccagauuuuuuccaccuugga

SEQ ID NO: 4836 - RNA, 23 nt, artificial
  siRNA Oligomer
cagauuugccuauuuugauuuuc

SEQ ID NO: 4837 - RNA, 23 nt, artificial
  siRNA Oligomer
uuuauaguacagccuagagaaug

SEQ ID NO: 4838 - RNA, 23 nt, artificial
  siRNA Oligomer
guuuauaguacagccuagagaau

SEQ ID NO: 4839 - RNA, 23 nt, artificial
  siRNA Oligomer
gguuuauaguacagccuagagaa

SEQ ID NO: 4840 - RNA, 23 nt, artificial
  siRNA Oligomer
gcgagguuguguuaugcacguga

SEQ ID NO: 4841 - RNA, 23 nt, artificial
  siRNA Oligomer
gauaccugucacuagggaauaau

SEQ ID NO: 4842 - RNA, 23 nt, artificial
  siRNA Oligomer
ggauaccugucacuagggaauaa

SEQ ID NO: 4843 - RNA, 23 nt, artificial
  siRNA Oligomer
uggauaccugucacuagggaaua

SEQ ID NO: 4844 - RNA, 23 nt, artificial
  siRNA Oligomer
uuggauaccugucacuagggaau

SEQ ID NO: 4845 - RNA, 23 nt, artificial
  siRNA Oligomer
cuuggauaccugucacuagggaa

SEQ ID NO: 4846 - RNA, 23 nt, artificial
  siRNA Oligomer
uaaaugagaaauauuacggcaau

SEQ ID NO: 4847 - RNA, 23 nt, artificial
  siRNA Oligomer
ccuaucaaaacuuccaaaagccc

SEQ ID NO: 4848 - RNA, 23 nt, artificial
  siRNA Oligomer
gcguagggacagauguauucauc

SEQ ID NO: 4849 - RNA, 23 nt, artificial
  siRNA Oligomer
ggcguagggacagauguauucau

SEQ ID NO: 4850 - RNA, 23 nt, artificial
  siRNA Oligomer
cggcguagggacagauguauuca

SEQ ID NO: 4851 - RNA, 23 nt, artificial
  siRNA Oligomer
ccggcguagggacagauguauuc

SEQ ID NO: 4852 - RNA, 23 nt, artificial
  siRNA Oligomer
accggcguagggacagauguauu

SEQ ID NO: 4853 - RNA, 23 nt, artificial
  siRNA Oligomer
gauacuauaagugaccuaaaaug

SEQ ID NO: 4854 - RNA, 23 nt, artificial
  siRNA Oligomer
ugauacuauaagugaccuaaaau

SEQ ID NO: 4855 - RNA, 23 nt, artificial
  siRNA Oligomer
cugauacuauaagugaccuaaaa

SEQ ID NO: 4856 - RNA, 23 nt, artificial
  siRNA Oligomer
acugauacuauaagugaccuaaa

SEQ ID NO: 4857 - RNA, 23 nt, artificial
  siRNA Oligomer
uacugauacuauaagugaccuaa

SEQ ID NO: 4858 - RNA, 23 nt, artificial
  siRNA Oligomer
cgaagucugcauuggcuauggag

SEQ ID NO: 4859 - RNA, 23 nt, artificial
  siRNA Oligomer
acgaagucugcauuggcuaugga

SEQ ID NO: 4860 - RNA, 23 nt, artificial
  siRNA Oligomer
uacgaagucugcauuggcuaugg

SEQ ID NO: 4861 - RNA, 23 nt, artificial
  siRNA Oligomer
uuacgaagucugcauuggcuaug

SEQ ID NO: 4862 - RNA, 23 nt, artificial
  siRNA Oligomer
uuuacgaagucugcauuggcuau

SEQ ID NO: 4863 - RNA, 23 nt, artificial
  siRNA Oligomer
ggauaggauugugugugauucua

SEQ ID NO: 4864 - RNA, 23 nt, artificial
  siRNA Oligomer
uggauaggauugugugugauucu

SEQ ID NO: 4865 - RNA, 23 nt, artificial
  siRNA Oligomer
cuggauaggauugugugugauuc

SEQ ID NO: 4866 - RNA, 23 nt, artificial
  siRNA Oligomer
gcuggauaggauugugugugauu

SEQ ID NO: 4867 - RNA, 23 nt, artificial
  siRNA Oligomer
agcuggauaggauugugugugau

SEQ ID NO: 4868 - RNA, 23 nt, artificial
  siRNA Oligomer
uggccuuuggagaagugauucaa

SEQ ID NO: 4869 - RNA, 23 nt, artificial
  siRNA Oligomer
cuggccuuuggagaagugauuca

SEQ ID NO: 4870 - RNA, 23 nt, artificial
  siRNA Oligomer
ucuggccuuuggagaagugauuc

SEQ ID NO: 4871 - RNA, 23 nt, artificial
  siRNA Oligomer
uucuggccuuuggagaagugauu

SEQ ID NO: 4872 - RNA, 23 nt, artificial
  siRNA Oligomer
auagguaagcaaaaguagaagcc

SEQ ID NO: 4873 - RNA, 23 nt, artificial
  siRNA Oligomer
aauagguaagcaaaaguagaagc

SEQ ID NO: 4874 - RNA, 23 nt, artificial
  siRNA Oligomer
agguaggauuaaguaggugaguu

SEQ ID NO: 4875 - RNA, 23 nt, artificial
  siRNA Oligomer
aagguaggauuaaguaggugagu

SEQ ID NO: 4876 - RNA, 23 nt, artificial
  siRNA Oligomer
gaagguaggauuaaguaggugag

SEQ ID NO: 4877 - RNA, 23 nt, artificial
  siRNA Oligomer
ggaagguaggauuaaguagguga

SEQ ID NO: 4878 - RNA, 23 nt, artificial
  siRNA Oligomer
gauuaaguaggugaguuuaauua

SEQ ID NO: 4879 - RNA, 23 nt, artificial
  siRNA Oligomer
aggaagguaggauuaaguaggug

SEQ ID NO: 4880 - RNA, 23 nt, artificial
  siRNA Oligomer
caggaagguaggauuaaguaggu

SEQ ID NO: 4881 - RNA, 23 nt, artificial
  siRNA Oligomer
acaggaagguaggauuaaguagg

SEQ ID NO: 4882 - RNA, 23 nt, artificial
  siRNA Oligomer
aacaggugugauccuguuacuga

SEQ ID NO: 4883 - RNA, 23 nt, artificial
  siRNA Oligomer
cauggacuagcuucagggacuuu

SEQ ID NO: 4884 - RNA, 23 nt, artificial
  siRNA Oligomer
ucauggacuagcuucagggacuu

SEQ ID NO: 4885 - RNA, 23 nt, artificial
  siRNA Oligomer
cucauggacuagcuucagggacu

SEQ ID NO: 4886 - RNA, 23 nt, artificial
  siRNA Oligomer
gcucauggacuagcuucagggac

SEQ ID NO: 4887 - RNA, 23 nt, artificial
  siRNA Oligomer
ugcucauggacuagcuucaggga

SEQ ID NO: 4888 - RNA, 23 nt, artificial
  siRNA Oligomer
auuugaaggguuuuuagacagga

SEQ ID NO: 4889 - RNA, 23 nt, artificial
  siRNA Oligomer
acaacagugauugaaggguccua

SEQ ID NO: 4890 - RNA, 23 nt, artificial
  siRNA Oligomer
uguacagaauugaaugggaugga

SEQ ID NO: 4891 - RNA, 23 nt, artificial
  siRNA Oligomer
uuguacagaauugaaugggaugg

SEQ ID NO: 4892 - RNA, 23 nt, artificial
  siRNA Oligomer
uuuguacagaauugaaugggaug

SEQ ID NO: 4893 - RNA, 23 nt, artificial
  siRNA Oligomer
uuuuguacagaauugaaugggau

SEQ ID NO: 4894 - RNA, 23 nt, artificial
  siRNA Oligomer
uuuuuguacagaauugaauggga

SEQ ID NO: 4895 - RNA, 23 nt, artificial
  siRNA Oligomer
cucaacgagguaauauuugagga

SEQ ID NO: 4896 - RNA, 23 nt, artificial
  siRNA Oligomer
ccucaacgagguaauauuugagg

SEQ ID NO: 4897 - RNA, 23 nt, artificial
  siRNA Oligomer
accucaacgagguaauauuugag

SEQ ID NO: 4898 - RNA, 23 nt, artificial
  siRNA Oligomer
aaccucaacgagguaauauuuga

SEQ ID NO: 4899 - RNA, 23 nt, artificial
  siRNA Oligomer
ucucugggcuuuucugggaauug

SEQ ID NO: 4900 - RNA, 23 nt, artificial
  siRNA Oligomer
aucucugggcuuuucugggaauu

SEQ ID NO: 4901 - RNA, 23 nt, artificial
  siRNA Oligomer
caucucugggcuuuucugggaau

SEQ ID NO: 4902 - RNA, 23 nt, artificial
  siRNA Oligomer
ucaucucugggcuuuucugggaa

SEQ ID NO: 4903 - RNA, 23 nt, artificial
  siRNA Oligomer
ggcuugcgagguuguguuaugca

SEQ ID NO: 4904 - RNA, 23 nt, artificial
  siRNA Oligomer
cggcuugcgagguuguguuaugc

SEQ ID NO: 4905 - RNA, 23 nt, artificial
  siRNA Oligomer
gcggcuugcgagguuguguuaug

SEQ ID NO: 4906 - RNA, 23 nt, artificial
  siRNA Oligomer
ugcggcuugcgagguuguguuau

SEQ ID NO: 4907 - RNA, 23 nt, artificial
  siRNA Oligomer
cugcggcuugcgagguuguguua

SEQ ID NO: 4908 - RNA, 23 nt, artificial
  siRNA Oligomer
uacggcaauaauggaacugcuuc

SEQ ID NO: 4909 - RNA, 23 nt, artificial
  siRNA Oligomer
uuacggcaauaauggaacugcuu

SEQ ID NO: 4910 - RNA, 23 nt, artificial
  siRNA Oligomer
auuacggcaauaauggaacugcu

SEQ ID NO: 4911 - RNA, 23 nt, artificial
  siRNA Oligomer
cuuuacucacugauuggaacaac

SEQ ID NO: 4912 - RNA, 23 nt, artificial
  siRNA Oligomer
acuuuacucacugauuggaacaa

SEQ ID NO: 4913 - RNA, 23 nt, artificial
  siRNA Oligomer
aacuuuacucacugauuggaaca

SEQ ID NO: 4914 - RNA, 23 nt, artificial
  siRNA Oligomer
aaacuuuacucacugauuggaac

SEQ ID NO: 4915 - RNA, 23 nt, artificial
  siRNA Oligomer
aaaacuuuacucacugauuggaa

SEQ ID NO: 4916 - RNA, 23 nt, artificial
  siRNA Oligomer
uuuuagacaggaagguaggauua

SEQ ID NO: 4917 - RNA, 23 nt, artificial
  siRNA Oligomer
ugacuuccucacucuaauguuuu

SEQ ID NO: 4918 - RNA, 23 nt, artificial
  siRNA Oligomer
ggacuuuuucuuuaguagagguc

SEQ ID NO: 4919 - RNA, 23 nt, artificial
  siRNA Oligomer
gggacuuuuucuuuaguagaggu

SEQ ID NO: 4920 - RNA, 23 nt, artificial
  siRNA Oligomer
agggacuuuuucuuuaguagagg

SEQ ID NO: 4921 - RNA, 23 nt, artificial
  siRNA Oligomer
cagggacuuuuucuuuaguagag

SEQ ID NO: 4922 - RNA, 23 nt, artificial
  siRNA Oligomer
ucagggacuuuuucuuuaguaga

SEQ ID NO: 4923 - RNA, 23 nt, artificial
  siRNA Oligomer
cucugauucacuuaguaaucuau

SEQ ID NO: 4924 - RNA, 23 nt, artificial
  siRNA Oligomer
ucucugauucacuuaguaaucua

SEQ ID NO: 4925 - RNA, 23 nt, artificial
  siRNA Oligomer
gggaauaauaaaggccuuauuuu

SEQ ID NO: 4926 - RNA, 23 nt, artificial
  siRNA Oligomer
agggaauaauaaaggccuuauuu

SEQ ID NO: 4927 - RNA, 23 nt, artificial
  siRNA Oligomer
uagggaauaauaaaggccuuauu

SEQ ID NO: 4928 - RNA, 23 nt, artificial
  siRNA Oligomer
cuagggaauaauaaaggccuuau

SEQ ID NO: 4929 - RNA, 23 nt, artificial
  siRNA Oligomer
acuagggaauaauaaaggccuua

SEQ ID NO: 4930 - RNA, 23 nt, artificial
  siRNA Oligomer
aauaccugugaggauaggaaauu

SEQ ID NO: 4931 - RNA, 23 nt, artificial
  siRNA Oligomer
gaauaccugugaggauaggaaau

SEQ ID NO: 4932 - RNA, 23 nt, artificial
  siRNA Oligomer
ugaauaccugugaggauaggaaa

SEQ ID NO: 4933 - RNA, 23 nt, artificial
  siRNA Oligomer
ccuuggauaccugucacuaggga

SEQ ID NO: 4934 - RNA, 23 nt, artificial
  siRNA Oligomer
cuagcuucagggacuuuuucuuu

SEQ ID NO: 4935 - RNA, 23 nt, artificial
  siRNA Oligomer
acuagcuucagggacuuuuucuu

SEQ ID NO: 4936 - RNA, 23 nt, artificial
  siRNA Oligomer
gacuagcuucagggacuuuuucu

SEQ ID NO: 4937 - RNA, 23 nt, artificial
  siRNA Oligomer
ggacuagcuucagggacuuuuuc

SEQ ID NO: 4938 - RNA, 23 nt, artificial
  siRNA Oligomer
uggacuagcuucagggacuuuuu

SEQ ID NO: 4939 - RNA, 23 nt, artificial
  siRNA Oligomer
aaagauacuacaaagccaaucuu

SEQ ID NO: 4940 - RNA, 23 nt, artificial
  siRNA Oligomer
aagcuggauaggauuguguguga

SEQ ID NO: 4941 - RNA, 23 nt, artificial
  siRNA Oligomer
uguggugccauuucaguaaccac

SEQ ID NO: 4942 - RNA, 23 nt, artificial
  siRNA Oligomer
uuguggugccauuucaguaacca

SEQ ID NO: 4943 - RNA, 23 nt, artificial
  siRNA Oligomer
cuuguggugccauuucaguaacc

SEQ ID NO: 4944 - RNA, 23 nt, artificial
  siRNA Oligomer
gcuuguggugccauuucaguaac

SEQ ID NO: 4945 - RNA, 23 nt, artificial
  siRNA Oligomer
agcuuguggugccauuucaguaa

SEQ ID NO: 4946 - RNA, 23 nt, artificial
  siRNA Oligomer
cuuuauagaauugggccaagaua

SEQ ID NO: 4947 - RNA, 23 nt, artificial
  siRNA Oligomer
guuucagguaggcuugguaauag

SEQ ID NO: 4948 - RNA, 23 nt, artificial
  siRNA Oligomer
gguuucagguaggcuugguaaua

SEQ ID NO: 4949 - RNA, 23 nt, artificial
  siRNA Oligomer
ugguuucagguaggcuugguaau

SEQ ID NO: 4950 - RNA, 23 nt, artificial
  siRNA Oligomer
uugguuucagguaggcuugguaa

SEQ ID NO: 4951 - RNA, 23 nt, artificial
  siRNA Oligomer
uuugguuucagguaggcuuggua

SEQ ID NO: 4952 - RNA, 23 nt, artificial
  siRNA Oligomer
ugggucguggauaaggagcuuau

SEQ ID NO: 4953 - RNA, 23 nt, artificial
  siRNA Oligomer
gugggucguggauaaggagcuua

SEQ ID NO: 4954 - RNA, 23 nt, artificial
  siRNA Oligomer
aauggugauggcuuauggaaggc

SEQ ID NO: 4955 - RNA, 23 nt, artificial
  siRNA Oligomer
aaauggugauggcuuauggaagg

SEQ ID NO: 4956 - RNA, 23 nt, artificial
  siRNA Oligomer
aaaauggugauggcuuauggaag

SEQ ID NO: 4957 - RNA, 23 nt, artificial
  siRNA Oligomer
caaaauggugauggcuuauggaa

SEQ ID NO: 4958 - RNA, 23 nt, artificial
  siRNA Oligomer
aagcuuguggugccauuucagua

SEQ ID NO: 4959 - RNA, 23 nt, artificial
  siRNA Oligomer
aaagcuuguggugccauuucagu

SEQ ID NO: 4960 - RNA, 23 nt, artificial
  siRNA Oligomer
aaaagcuuguggugccauuucag

SEQ ID NO: 4961 - RNA, 23 nt, artificial
  siRNA Oligomer
uagguaagcaaaaguagaagccc

SEQ ID NO: 4962 - RNA, 23 nt, artificial
  siRNA Oligomer
ugauuuucuggccuuuggagaag

SEQ ID NO: 4963 - RNA, 23 nt, artificial
  siRNA Oligomer
cugauuuucuggccuuuggagaa

SEQ ID NO: 4964 - RNA, 23 nt, artificial
  siRNA Oligomer
gcugauuuucuggccuuuggaga

SEQ ID NO: 4965 - RNA, 23 nt, artificial
  siRNA Oligomer
aggcugauuuucuggccuuugga

SEQ ID NO: 4966 - RNA, 23 nt, artificial
  siRNA Oligomer
aggcuucuugggcaucgauguag

SEQ ID NO: 4967 - RNA, 23 nt, artificial
  siRNA Oligomer
aaggcuucuugggcaucgaugua

SEQ ID NO: 4968 - RNA, 23 nt, artificial
  siRNA Oligomer
caaggcuucuugggcaucgaugu

SEQ ID NO: 4969 - RNA, 23 nt, artificial
  siRNA Oligomer
ccguccagauaaccaugcaugca

SEQ ID NO: 4970 - RNA, 23 nt, artificial
  siRNA Oligomer
accguccagauaaccaugcaugc

SEQ ID NO: 4971 - RNA, 23 nt, artificial
  siRNA Oligomer
caccguccagauaaccaugcaug

SEQ ID NO: 4972 - RNA, 23 nt, artificial
  siRNA Oligomer
ucaccguccagauaaccaugcau

SEQ ID NO: 4973 - RNA, 23 nt, artificial
  siRNA Oligomer
cucaccguccagauaaccaugca

SEQ ID NO: 4974 - RNA, 23 nt, artificial
  siRNA Oligomer
aaccaugcaugcacccagauuuu

SEQ ID NO: 4975 - RNA, 23 nt, artificial
  siRNA Oligomer
uaaccaugcaugcacccagauuu

SEQ ID NO: 4976 - RNA, 23 nt, artificial
  siRNA Oligomer
auaaccaugcaugcacccagauu

SEQ ID NO: 4977 - RNA, 23 nt, artificial
  siRNA Oligomer
gauaaccaugcaugcacccagau

SEQ ID NO: 4978 - RNA, 23 nt, artificial
  siRNA Oligomer
agauaaccaugcaugcacccaga

SEQ ID NO: 4979 - RNA, 23 nt, artificial
  siRNA Oligomer
gaauugggccaagauaaaucaau

SEQ ID NO: 4980 - RNA, 23 nt, artificial
  siRNA Oligomer
gugaggauaggaaauuaguucug

SEQ ID NO: 4981 - RNA, 23 nt, artificial
  siRNA Oligomer
ugugaggauaggaaauuaguucu

SEQ ID NO: 4982 - RNA, 23 nt, artificial
  siRNA Oligomer
gauuuuuuccaccuuggauaccu

SEQ ID NO: 4983 - RNA, 23 nt, artificial
  siRNA Oligomer
gaagcccauuugaguuuuacauu

SEQ ID NO: 4984 - RNA, 23 nt, artificial
  siRNA Oligomer
agaagcccauuugaguuuuacau

SEQ ID NO: 4985 - RNA, 23 nt, artificial
  siRNA Oligomer
uagaagcccauuugaguuuuaca

SEQ ID NO: 4986 - RNA, 23 nt, artificial
  siRNA Oligomer
guagaagcccauuugaguuuuac

SEQ ID NO: 4987 - RNA, 23 nt, artificial
  siRNA Oligomer
aguagaagcccauuugaguuuua

SEQ ID NO: 4988 - RNA, 23 nt, artificial
  siRNA Oligomer
agcaggagaacugcucauggacu

SEQ ID NO: 4989 - RNA, 23 nt, artificial
  siRNA Oligomer
aagcaggagaacugcucauggac

SEQ ID NO: 4990 - RNA, 23 nt, artificial
  siRNA Oligomer
uaagcaggagaacugcucaugga

SEQ ID NO: 4991 - RNA, 23 nt, artificial
  siRNA Oligomer
gcaugcacccagauuuuuuccac

SEQ ID NO: 4992 - RNA, 23 nt, artificial
  siRNA Oligomer
ugcaugcacccagauuuuuucca

SEQ ID NO: 4993 - RNA, 23 nt, artificial
  siRNA Oligomer
augcaugcacccagauuuuuucc

SEQ ID NO: 4994 - RNA, 23 nt, artificial
  siRNA Oligomer
caugcaugcacccagauuuuuuc

SEQ ID NO: 4995 - RNA, 23 nt, artificial
  siRNA Oligomer
ccaugcaugcacccagauuuuuu

SEQ ID NO: 4996 - RNA, 23 nt, artificial
  siRNA Oligomer
ccugcuaagugauuuugacuacu

SEQ ID NO: 4997 - RNA, 23 nt, artificial
  siRNA Oligomer
uacugggauuauguuguuccuga

SEQ ID NO: 4998 - RNA, 23 nt, artificial
  siRNA Oligomer
cucuugccuguuaugcuuacaaa

SEQ ID NO: 4999 - RNA, 23 nt, artificial
  siRNA Oligomer
ccaccuuggauaccugucacuag

SEQ ID NO: 5000 - RNA, 23 nt, artificial
  siRNA Oligomer
uccaccuuggauaccugucacua

SEQ ID NO: 5001 - RNA, 23 nt, artificial
  siRNA Oligomer
uuccaccuuggauaccugucacu

SEQ ID NO: 5002 - RNA, 23 nt, artificial
  siRNA Oligomer
uuuccaccuuggauaccugucac

SEQ ID NO: 5003 - RNA, 23 nt, artificial
  siRNA Oligomer
uuuuccaccuuggauaccuguca

SEQ ID NO: 5004 - RNA, 23 nt, artificial
  siRNA Oligomer
uuucuggccuuuggagaagugau

SEQ ID NO: 5005 - RNA, 23 nt, artificial
  siRNA Oligomer
uucugcauagaucccauuuuugu

SEQ ID NO: 5006 - RNA, 23 nt, artificial
  siRNA Oligomer
uuucugcauagaucccauuuuug

SEQ ID NO: 5007 - RNA, 23 nt, artificial
  siRNA Oligomer
uuuucugcauagaucccauuuuu

SEQ ID NO: 5008 - RNA, 23 nt, artificial
  siRNA Oligomer
gaacccaaccucaacgagguaau

SEQ ID NO: 5009 - RNA, 23 nt, artificial
  siRNA Oligomer
agaaacugacccagagaauugcu

SEQ ID NO: 5010 - RNA, 23 nt, artificial
  siRNA Oligomer
uucuuggugacuuccucacucua

SEQ ID NO: 5011 - RNA, 23 nt, artificial
  siRNA Oligomer
cacuagggaauaauaaaggccuu

SEQ ID NO: 5012 - RNA, 23 nt, artificial
  siRNA Oligomer
ccuguuaugcuuacaaaauggug

SEQ ID NO: 5013 - RNA, 23 nt, artificial
  siRNA Oligomer
aaaguagaagcccauuugaguuu

SEQ ID NO: 5014 - RNA, 23 nt, artificial
  siRNA Oligomer
aaaaguagaagcccauuugaguu

SEQ ID NO: 5015 - RNA, 23 nt, artificial
  siRNA Oligomer
caaaaguagaagcccauuugagu

SEQ ID NO: 5016 - RNA, 23 nt, artificial
  siRNA Oligomer
gcaaaaguagaagcccauuugag

SEQ ID NO: 5017 - RNA, 23 nt, artificial
  siRNA Oligomer
agcaaaaguagaagcccauuuga

SEQ ID NO: 5018 - RNA, 23 nt, artificial
  siRNA Oligomer
gauuuugacuacugggauuaugu

SEQ ID NO: 5019 - RNA, 23 nt, artificial
  siRNA Oligomer
ugauuuugacuacugggauuaug

SEQ ID NO: 5020 - RNA, 23 nt, artificial
  siRNA Oligomer
gugauuuugacuacugggauuau

SEQ ID NO: 5021 - RNA, 23 nt, artificial
  siRNA Oligomer
agugauuuugacuacugggauua

SEQ ID NO: 5022 - RNA, 23 nt, artificial
  siRNA Oligomer
aagugauuuugacuacugggauu

SEQ ID NO: 5023 - RNA, 23 nt, artificial
  siRNA Oligomer
ugauggcuuauggaaggcuguua

SEQ ID NO: 5024 - RNA, 23 nt, artificial
  siRNA Oligomer
uguuguccuuuuuccacuaacag

SEQ ID NO: 5025 - RNA, 23 nt, artificial
  siRNA Oligomer
cuguuguccuuuuuccacuaaca

SEQ ID NO: 5026 - RNA, 23 nt, artificial
  siRNA Oligomer
acuguuguccuuuuuccacuaac

SEQ ID NO: 5027 - RNA, 23 nt, artificial
  siRNA Oligomer
aacuguuguccuuuuuccacuaa

SEQ ID NO: 5028 - RNA, 23 nt, artificial
  siRNA Oligomer
gaacuguuguccuuuuuccacua

SEQ ID NO: 5029 - RNA, 23 nt, artificial
  siRNA Oligomer
gaccggcguagggacagauguau

SEQ ID NO: 5030 - RNA, 23 nt, artificial
  siRNA Oligomer
aguguagauuuucugcauagauc

SEQ ID NO: 5031 - RNA, 23 nt, artificial
  siRNA Oligomer
uaguguagauuuucugcauagau

SEQ ID NO: 5032 - RNA, 23 nt, artificial
  siRNA Oligomer
auaguguagauuuucugcauaga

SEQ ID NO: 5033 - RNA, 23 nt, artificial
  siRNA Oligomer
aauaguguagauuuucugcauag

SEQ ID NO: 5034 - RNA, 23 nt, artificial
  siRNA Oligomer
aaauaguguagauuuucugcaua

SEQ ID NO: 5035 - RNA, 23 nt, artificial
  siRNA Oligomer
accuuggauaccugucacuaggg

SEQ ID NO: 5036 - RNA, 23 nt, artificial
  siRNA Oligomer
caccuuggauaccugucacuagg

SEQ ID NO: 5037 - RNA, 23 nt, artificial
  siRNA Oligomer
cacccagauuuuuuccaccuugg

SEQ ID NO: 5038 - RNA, 23 nt, artificial
  siRNA Oligomer
gcacccagauuuuuuccaccuug

SEQ ID NO: 5039 - RNA, 23 nt, artificial
  siRNA Oligomer
gauaggaaauuaguucugagauc

SEQ ID NO: 5040 - RNA, 23 nt, artificial
  siRNA Oligomer
ggauaggaaauuaguucugagau

SEQ ID NO: 5041 - RNA, 23 nt, artificial
  siRNA Oligomer
aggauaggaaauuaguucugaga

SEQ ID NO: 5042 - RNA, 23 nt, artificial
  siRNA Oligomer
gaggauaggaaauuaguucugag

SEQ ID NO: 5043 - RNA, 23 nt, artificial
  siRNA Oligomer
ugaggauaggaaauuaguucuga

SEQ ID NO: 5044 - RNA, 23 nt, artificial
  siRNA Oligomer
accugcccuaaauaagaaacccc

SEQ ID NO: 5045 - RNA, 23 nt, artificial
  siRNA Oligomer
cagcuaaagucauuuguaguuug

SEQ ID NO: 5046 - RNA, 23 nt, artificial
  siRNA Oligomer
ucagcuaaagucauuuguaguuu

SEQ ID NO: 5047 - RNA, 23 nt, artificial
  siRNA Oligomer
gucagcuaaagucauuuguaguu

SEQ ID NO: 5048 - RNA, 23 nt, artificial
  siRNA Oligomer
agucagcuaaagucauuuguagu

SEQ ID NO: 5049 - RNA, 23 nt, artificial
  siRNA Oligomer
uagucagcuaaagucauuuguag

SEQ ID NO: 5050 - RNA, 23 nt, artificial
  siRNA Oligomer
ggcuuuuuuuucucuaaguuuuc

SEQ ID NO: 5051 - RNA, 23 nt, artificial
  siRNA Oligomer
uggcuuuuuuuucucuaaguuuu

SEQ ID NO: 5052 - RNA, 23 nt, artificial
  siRNA Oligomer
auggcuuuuuuuucucuaaguuu

SEQ ID NO: 5053 - RNA, 23 nt, artificial
  siRNA Oligomer
uauggcuuuuuuuucucuaaguu

SEQ ID NO: 5054 - RNA, 23 nt, artificial
  siRNA Oligomer
auauggcuuuuuuuucucuaagu

SEQ ID NO: 5055 - RNA, 23 nt, artificial
  siRNA Oligomer
uaugcacgugaacuuggaaauug

SEQ ID NO: 5056 - RNA, 23 nt, artificial
  siRNA Oligomer
uuaugcacgugaacuuggaaauu

SEQ ID NO: 5057 - RNA, 23 nt, artificial
  siRNA Oligomer
guuaugcacgugaacuuggaaau

SEQ ID NO: 5058 - RNA, 23 nt, artificial
  siRNA Oligomer
uguuaugcacgugaacuuggaaa

SEQ ID NO: 5059 - RNA, 23 nt, artificial
  siRNA Oligomer
guguuaugcacgugaacuuggaa

SEQ ID NO: 5060 - RNA, 23 nt, artificial
  siRNA Oligomer
auggacuagcuucagggacuuuu

SEQ ID NO: 5061 - RNA, 23 nt, artificial
  siRNA Oligomer
cguugaccaugguugcaacuggc

SEQ ID NO: 5062 - RNA, 23 nt, artificial
  siRNA Oligomer
ccguugaccaugguugcaacugg

SEQ ID NO: 5063 - RNA, 23 nt, artificial
  siRNA Oligomer
gccguugaccaugguugcaacug

SEQ ID NO: 5064 - RNA, 23 nt, artificial
  siRNA Oligomer
agccguugaccaugguugcaacu

SEQ ID NO: 5065 - RNA, 23 nt, artificial
  siRNA Oligomer
gagccguugaccaugguugcaac

SEQ ID NO: 5066 - RNA, 23 nt, artificial
  siRNA Oligomer
ugcaugucuauuguuaagcucca

SEQ ID NO: 5067 - RNA, 23 nt, artificial
  siRNA Oligomer
caauuuacgaagucugcauuggc

SEQ ID NO: 5068 - RNA, 23 nt, artificial
  siRNA Oligomer
ucaauuuacgaagucugcauugg

SEQ ID NO: 5069 - RNA, 23 nt, artificial
  siRNA Oligomer
gucaauuuacgaagucugcauug

SEQ ID NO: 5070 - RNA, 23 nt, artificial
  siRNA Oligomer
ggucaauuuacgaagucugcauu

SEQ ID NO: 5071 - RNA, 23 nt, artificial
  siRNA Oligomer
gggucaauuuacgaagucugcau

SEQ ID NO: 5072 - RNA, 23 nt, artificial
  siRNA Oligomer
cuagucagcuaaagucauuugua

SEQ ID NO: 5073 - RNA, 23 nt, artificial
  siRNA Oligomer
aaagcuggauaggauugugugug

SEQ ID NO: 5074 - RNA, 23 nt, artificial
  siRNA Oligomer
aaaagcuggauaggauugugugu

SEQ ID NO: 5075 - RNA, 23 nt, artificial
  siRNA Oligomer
guacagccuagagaaugaaacuc

SEQ ID NO: 5076 - RNA, 23 nt, artificial
  siRNA Oligomer
gauucuagcgucguaccuacuuu

SEQ ID NO: 5077 - RNA, 23 nt, artificial
  siRNA Oligomer
ugauucuagcgucguaccuacuu

SEQ ID NO: 5078 - RNA, 23 nt, artificial
  siRNA Oligomer
gugauucuagcgucguaccuacu

SEQ ID NO: 5079 - RNA, 23 nt, artificial
  siRNA Oligomer
ugugauucuagcgucguaccuac

SEQ ID NO: 5080 - RNA, 23 nt, artificial
  siRNA Oligomer
gaucuagucccucucugauucac

SEQ ID NO: 5081 - RNA, 23 nt, artificial
  siRNA Oligomer
cuaacaaacuaaacucuucaaau

SEQ ID NO: 5082 - RNA, 23 nt, artificial
  siRNA Oligomer
ucuaacaaacuaaacucuucaaa

SEQ ID NO: 5083 - RNA, 23 nt, artificial
  siRNA Oligomer
uucuaacaaacuaaacucuucaa

SEQ ID NO: 5084 - RNA, 23 nt, artificial
  siRNA Oligomer
gacucaaauuugaaggguuuuua

SEQ ID NO: 5085 - RNA, 23 nt, artificial
  siRNA Oligomer
ugacucaaauuugaaggguuuuu

SEQ ID NO: 5086 - RNA, 23 nt, artificial
  siRNA Oligomer
cugacucaaauuugaaggguuuu

SEQ ID NO: 5087 - RNA, 23 nt, artificial
  siRNA Oligomer
ccugacucaaauuugaaggguuu

SEQ ID NO: 5088 - RNA, 23 nt, artificial
  siRNA Oligomer
uccugacucaaauuugaaggguu

SEQ ID NO: 5089 - RNA, 23 nt, artificial
  siRNA Oligomer
uccacucaacaauguucaauuca

SEQ ID NO: 5090 - RNA, 23 nt, artificial
  siRNA Oligomer
cuccacucaacaauguucaauuc

SEQ ID NO: 5091 - RNA, 23 nt, artificial
  siRNA Oligomer
ccuccacucaacaauguucaauu

SEQ ID NO: 5092 - RNA, 23 nt, artificial
  siRNA Oligomer
gccuccacucaacaauguucaau

SEQ ID NO: 5093 - RNA, 23 nt, artificial
  siRNA Oligomer
agccuccacucaacaauguucaa

SEQ ID NO: 5094 - RNA, 23 nt, artificial
  siRNA Oligomer
uguagauuuucugcauagauccc

SEQ ID NO: 5095 - RNA, 23 nt, artificial
  siRNA Oligomer
guguagauuuucugcauagaucc

SEQ ID NO: 5096 - RNA, 23 nt, artificial
  siRNA Oligomer
gcuauggagauaugguuuauagu

SEQ ID NO: 5097 - RNA, 23 nt, artificial
  siRNA Oligomer
ggcuauggagauaugguuuauag

SEQ ID NO: 5098 - RNA, 23 nt, artificial
  siRNA Oligomer
uggcuauggagauaugguuuaua

SEQ ID NO: 5099 - RNA, 23 nt, artificial
  siRNA Oligomer
uuggcuauggagauaugguuuau

SEQ ID NO: 5100 - RNA, 23 nt, artificial
  siRNA Oligomer
auuggcuauggagauaugguuua

SEQ ID NO: 5101 - RNA, 23 nt, artificial
  siRNA Oligomer
guauacuaccacuuugaauuauu

SEQ ID NO: 5102 - RNA, 23 nt, artificial
  siRNA Oligomer
uguauacuaccacuuugaauuau

SEQ ID NO: 5103 - RNA, 23 nt, artificial
  siRNA Oligomer
cuguauacuaccacuuugaauua

SEQ ID NO: 5104 - RNA, 23 nt, artificial
  siRNA Oligomer
gcuguauacuaccacuuugaauu

SEQ ID NO: 5105 - RNA, 23 nt, artificial
  siRNA Oligomer
agcuguauacuaccacuuugaau

SEQ ID NO: 5106 - RNA, 23 nt, artificial
  siRNA Oligomer
agagccguugaccaugguugcaa

SEQ ID NO: 5107 - RNA, 23 nt, artificial
  siRNA Oligomer
gaauuauugaaacgggucaauuu

SEQ ID NO: 5108 - RNA, 23 nt, artificial
  siRNA Oligomer
ugaauuauugaaacgggucaauu

SEQ ID NO: 5109 - RNA, 23 nt, artificial
  siRNA Oligomer
uugaauuauugaaacgggucaau

SEQ ID NO: 5110 - RNA, 23 nt, artificial
  siRNA Oligomer
uuugaauuauugaaacgggucaa

SEQ ID NO: 5111 - RNA, 23 nt, artificial
  siRNA Oligomer
cuuugaauuauugaaacggguca

SEQ ID NO: 5112 - RNA, 23 nt, artificial
  siRNA Oligomer
agcccauuugaguuuuacauuug

SEQ ID NO: 5113 - RNA, 23 nt, artificial
  siRNA Oligomer
aagcccauuugaguuuuacauuu

SEQ ID NO: 5114 - RNA, 23 nt, artificial
  siRNA Oligomer
aggauugugugugauucuagcgu

SEQ ID NO: 5115 - RNA, 23 nt, artificial
  siRNA Oligomer
uaggauugugugugauucuagcg

SEQ ID NO: 5116 - RNA, 23 nt, artificial
  siRNA Oligomer
auaggauugugugugauucuagc

SEQ ID NO: 5117 - RNA, 23 nt, artificial
  siRNA Oligomer
gauaggauugugugugauucuag

SEQ ID NO: 5118 - RNA, 23 nt, artificial
  siRNA Oligomer
caaaugcuuggaaagauacuaca

SEQ ID NO: 5119 - RNA, 23 nt, artificial
  siRNA Oligomer
cauuggcuauggagauaugguuu

SEQ ID NO: 5120 - RNA, 23 nt, artificial
  siRNA Oligomer
cuuuuuccacuaacaguuaucuu

SEQ ID NO: 5121 - RNA, 23 nt, artificial
  siRNA Oligomer
ccuuuuuccacuaacaguuaucu

SEQ ID NO: 5122 - RNA, 23 nt, artificial
  siRNA Oligomer
uccuuuuuccacuaacaguuauc

SEQ ID NO: 5123 - RNA, 23 nt, artificial
  siRNA Oligomer
guccuuuuuccacuaacaguuau

SEQ ID NO: 5124 - RNA, 23 nt, artificial
  siRNA Oligomer
uguccuuuuuccacuaacaguua

SEQ ID NO: 5125 - RNA, 23 nt, artificial
  siRNA Oligomer
ugcacccagauuuuuuccaccuu

SEQ ID NO: 5126 - RNA, 23 nt, artificial
  siRNA Oligomer
gguccuaaaaagggaaaauauau

SEQ ID NO: 5127 - RNA, 23 nt, artificial
  siRNA Oligomer
gcuucagggacuuuuucuuuagu

SEQ ID NO: 5128 - RNA, 23 nt, artificial
  siRNA Oligomer
agcuucagggacuuuuucuuuag

SEQ ID NO: 5129 - RNA, 23 nt, artificial
  siRNA Oligomer
uagcuucagggacuuuuucuuua

SEQ ID NO: 5130 - RNA, 23 nt, artificial
  siRNA Oligomer
cuaauguuuuaaagaggcaacaa

SEQ ID NO: 5131 - RNA, 23 nt, artificial
  siRNA Oligomer
ggaauaauaaaggccuuauuuuu

SEQ ID NO: 5132 - RNA, 23 nt, artificial
  siRNA Oligomer
uugcaugucuauuguuaagcucc

SEQ ID NO: 5133 - RNA, 23 nt, artificial
  siRNA Oligomer
uuugcaugucuauuguuaagcuc

SEQ ID NO: 5134 - RNA, 23 nt, artificial
  siRNA Oligomer
uuuugcaugucuauuguuaagcu

SEQ ID NO: 5135 - RNA, 23 nt, artificial
  siRNA Oligomer
uagcuguauacuaccacuuugaa

SEQ ID NO: 5136 - RNA, 23 nt, artificial
  siRNA Oligomer
guagcuguauacuaccacuuuga

SEQ ID NO: 5137 - RNA, 23 nt, artificial
  siRNA Oligomer
guagauuuucugcauagauccca

SEQ ID NO: 5138 - RNA, 23 nt, artificial
  siRNA Oligomer
uguguuaugcacgugaacuugga

SEQ ID NO: 5139 - RNA, 23 nt, artificial
  siRNA Oligomer
gaaacugacccagagaauugcuc

SEQ ID NO: 5140 - RNA, 23 nt, artificial
  siRNA Oligomer
gaaacucaccguccagauaacca

SEQ ID NO: 5141 - RNA, 23 nt, artificial
  siRNA Oligomer
ugaaacucaccguccagauaacc

SEQ ID NO: 5142 - RNA, 23 nt, artificial
  siRNA Oligomer
augaaacucaccguccagauaac

SEQ ID NO: 5143 - RNA, 23 nt, artificial
  siRNA Oligomer
aaugaaacucaccguccagauaa

SEQ ID NO: 5144 - RNA, 23 nt, artificial
  siRNA Oligomer
gaaacagagccguugaccauggu

SEQ ID NO: 5145 - RNA, 23 nt, artificial
  siRNA Oligomer
ggaaacagagccguugaccaugg

SEQ ID NO: 5146 - RNA, 23 nt, artificial
  siRNA Oligomer
aggaaacagagccguugaccaug

SEQ ID NO: 5147 - RNA, 23 nt, artificial
  siRNA Oligomer
aaggaaacagagccguugaccau

SEQ ID NO: 5148 - RNA, 23 nt, artificial
  siRNA Oligomer
gaaggaaacagagccguugacca

SEQ ID NO: 5149 - RNA, 23 nt, artificial
  siRNA Oligomer
uacagccuagagaaugaaacuca

SEQ ID NO: 5150 - RNA, 23 nt, artificial
  siRNA Oligomer
ggagaacucugauccucagcuca

SEQ ID NO: 5151 - RNA, 23 nt, artificial
  siRNA Oligomer
aggagaacucugauccucagcuc

SEQ ID NO: 5152 - RNA, 23 nt, artificial
  siRNA Oligomer
caggagaacucugauccucagcu

SEQ ID NO: 5153 - RNA, 23 nt, artificial
  siRNA Oligomer
ucaggagaacucugauccucagc

SEQ ID NO: 5154 - RNA, 23 nt, artificial
  siRNA Oligomer
uucaggagaacucugauccucag

SEQ ID NO: 5155 - RNA, 23 nt, artificial
  siRNA Oligomer
uucagggacuuuuucuuuaguag

SEQ ID NO: 5156 - RNA, 23 nt, artificial
  siRNA Oligomer
cuucagggacuuuuucuuuagua

SEQ ID NO: 5157 - RNA, 23 nt, artificial
  siRNA Oligomer
aguugauuacucuuccauugagu

SEQ ID NO: 5158 - RNA, 23 nt, artificial
  siRNA Oligomer
uaguugauuacucuuccauugag

SEQ ID NO: 5159 - RNA, 23 nt, artificial
  siRNA Oligomer
guaguugauuacucuuccauuga

SEQ ID NO: 5160 - RNA, 23 nt, artificial
  siRNA Oligomer
uguaguugauuacucuuccauug

SEQ ID NO: 5161 - RNA, 23 nt, artificial
  siRNA Oligomer
guguaguugauuacucuuccauu

SEQ ID NO: 5162 - RNA, 23 nt, artificial
  siRNA Oligomer
ggaacaacagugauugaaggguc

SEQ ID NO: 5163 - RNA, 23 nt, artificial
  siRNA Oligomer
uggaacaacagugauugaagggu

SEQ ID NO: 5164 - RNA, 23 nt, artificial
  siRNA Oligomer
uuggaacaacagugauugaaggg

SEQ ID NO: 5165 - RNA, 23 nt, artificial
  siRNA Oligomer
auuggaacaacagugauugaagg

SEQ ID NO: 5166 - RNA, 23 nt, artificial
  siRNA Oligomer
gauuggaacaacagugauugaag

SEQ ID NO: 5167 - RNA, 23 nt, artificial
  siRNA Oligomer
caaagccaaucuuuauagaauug

SEQ ID NO: 5168 - RNA, 23 nt, artificial
  siRNA Oligomer
acaaagccaaucuuuauagaauu

SEQ ID NO: 5169 - RNA, 23 nt, artificial
  siRNA Oligomer
uacaaagccaaucuuuauagaau

SEQ ID NO: 5170 - RNA, 23 nt, artificial
  siRNA Oligomer
cuacaaagccaaucuuuauagaa

SEQ ID NO: 5171 - RNA, 23 nt, artificial
  siRNA Oligomer
acuacaaagccaaucuuuauaga

SEQ ID NO: 5172 - RNA, 23 nt, artificial
  siRNA Oligomer
aaacgggucaauuuacgaagucu

SEQ ID NO: 5173 - RNA, 23 nt, artificial
  siRNA Oligomer
gcaaggcuucuugggcaucgaug

SEQ ID NO: 5174 - RNA, 23 nt, artificial
  siRNA Oligomer
ggcaaggcuucuugggcaucgau

SEQ ID NO: 5175 - RNA, 23 nt, artificial
  siRNA Oligomer
gggcaaggcuucuugggcaucga

SEQ ID NO: 5176 - RNA, 23 nt, artificial
  siRNA Oligomer
ucccugagaaacugacccagaga

SEQ ID NO: 5177 - RNA, 23 nt, artificial
  siRNA Oligomer
gucccugagaaacugacccagag

SEQ ID NO: 5178 - RNA, 23 nt, artificial
  siRNA Oligomer
ugucccugagaaacugacccaga

SEQ ID NO: 5179 - RNA, 23 nt, artificial
  siRNA Oligomer
cugcauuggcuauggagauaugg

SEQ ID NO: 5180 - RNA, 23 nt, artificial
  siRNA Oligomer
ucugcauuggcuauggagauaug

SEQ ID NO: 5181 - RNA, 23 nt, artificial
  siRNA Oligomer
gucugcauuggcuauggagauau

SEQ ID NO: 5182 - RNA, 23 nt, artificial
  siRNA Oligomer
agucugcauuggcuauggagaua

SEQ ID NO: 5183 - RNA, 23 nt, artificial
  siRNA Oligomer
aagucugcauuggcuauggagau

SEQ ID NO: 5184 - RNA, 23 nt, artificial
  siRNA Oligomer
gauugugugugauucuagcgucg

SEQ ID NO: 5185 - RNA, 23 nt, artificial
  siRNA Oligomer
ggauugugugugauucuagcguc

SEQ ID NO: 5186 - RNA, 23 nt, artificial
  siRNA Oligomer
gcuagucagcuaaagucauuugu

SEQ ID NO: 5187 - RNA, 23 nt, artificial
  siRNA Oligomer
agcuagucagcuaaagucauuug

SEQ ID NO: 5188 - RNA, 23 nt, artificial
  siRNA Oligomer
cagcuagucagcuaaagucauuu

SEQ ID NO: 5189 - RNA, 23 nt, artificial
  siRNA Oligomer
ucagcuagucagcuaaagucauu

SEQ ID NO: 5190 - RNA, 23 nt, artificial
  siRNA Oligomer
uucagcuagucagcuaaagucau

SEQ ID NO: 5191 - RNA, 23 nt, artificial
  siRNA Oligomer
uguauucauccugguguuacuga

SEQ ID NO: 5192 - RNA, 23 nt, artificial
  siRNA Oligomer
auguauucauccugguguuacug

SEQ ID NO: 5193 - RNA, 23 nt, artificial
  siRNA Oligomer
gauguauucauccugguguuacu

SEQ ID NO: 5194 - RNA, 23 nt, artificial
  siRNA Oligomer
ggguaguaaaacuauucagcuag

SEQ ID NO: 5195 - RNA, 23 nt, artificial
  siRNA Oligomer
uggguaguaaaacuauucagcua

SEQ ID NO: 5196 - RNA, 23 nt, artificial
  siRNA Oligomer
uuggguaguaaaacuauucagcu

SEQ ID NO: 5197 - RNA, 23 nt, artificial
  siRNA Oligomer
auuggguaguaaaacuauucagc

SEQ ID NO: 5198 - RNA, 23 nt, artificial
  siRNA Oligomer
ugauuggaacaacagugauugaa

SEQ ID NO: 5199 - RNA, 23 nt, artificial
  siRNA Oligomer
cugauuggaacaacagugauuga

SEQ ID NO: 5200 - RNA, 23 nt, artificial
  siRNA Oligomer
acugauuggaacaacagugauug

SEQ ID NO: 5201 - RNA, 23 nt, artificial
  siRNA Oligomer
cacugauuggaacaacagugauu

SEQ ID NO: 5202 - RNA, 23 nt, artificial
  siRNA Oligomer
caguuaucuuugacucucuugcc

SEQ ID NO: 5203 - RNA, 23 nt, artificial
  siRNA Oligomer
acaguuaucuuugacucucuugc

SEQ ID NO: 5204 - RNA, 23 nt, artificial
  siRNA Oligomer
aacaguuaucuuugacucucuug

SEQ ID NO: 5205 - RNA, 23 nt, artificial
  siRNA Oligomer
uaacaguuaucuuugacucucuu

SEQ ID NO: 5206 - RNA, 23 nt, artificial
  siRNA Oligomer
cuaacaguuaucuuugacucucu

SEQ ID NO: 5207 - RNA, 23 nt, artificial
  siRNA Oligomer
cacaauuugguuucagguaggcu

SEQ ID NO: 5208 - RNA, 23 nt, artificial
  siRNA Oligomer
ccacaauuugguuucagguaggc

SEQ ID NO: 5209 - RNA, 23 nt, artificial
  siRNA Oligomer
uccacaauuugguuucagguagg

SEQ ID NO: 5210 - RNA, 23 nt, artificial
  siRNA Oligomer
uuccacaauuugguuucagguag

SEQ ID NO: 5211 - RNA, 23 nt, artificial
  siRNA Oligomer
auuccacaauuugguuucaggua

SEQ ID NO: 5212 - RNA, 23 nt, artificial
  siRNA Oligomer
gagaagugauucaaaauagugua

SEQ ID NO: 5213 - RNA, 23 nt, artificial
  siRNA Oligomer
gcuuuucugggaauugaaguauc

SEQ ID NO: 5214 - RNA, 23 nt, artificial
  siRNA Oligomer
gaagucugcauuggcuauggaga

SEQ ID NO: 5215 - RNA, 23 nt, artificial
  siRNA Oligomer
uacuacaaagccaaucuuuauag

SEQ ID NO: 5216 - RNA, 23 nt, artificial
  siRNA Oligomer
auacuacaaagccaaucuuuaua

SEQ ID NO: 5217 - RNA, 23 nt, artificial
  siRNA Oligomer
gauacuacaaagccaaucuuuau

SEQ ID NO: 5218 - RNA, 23 nt, artificial
  siRNA Oligomer
agauacuacaaagccaaucuuua

SEQ ID NO: 5219 - RNA, 23 nt, artificial
  siRNA Oligomer
aaaauaguguagauuuucugcau

SEQ ID NO: 5220 - RNA, 23 nt, artificial
  siRNA Oligomer
aagcaaaaguagaagcccauuug

SEQ ID NO: 5221 - RNA, 23 nt, artificial
  siRNA Oligomer
uaagcaaaaguagaagcccauuu

SEQ ID NO: 5222 - RNA, 23 nt, artificial
  siRNA Oligomer
guaagcaaaaguagaagcccauu

SEQ ID NO: 5223 - RNA, 23 nt, artificial
  siRNA Oligomer
cgggucaauuuacgaagucugca

SEQ ID NO: 5224 - RNA, 23 nt, artificial
  siRNA Oligomer
acgggucaauuuacgaagucugc

SEQ ID NO: 5225 - RNA, 23 nt, artificial
  siRNA Oligomer
aacgggucaauuuacgaagucug

SEQ ID NO: 5226 - RNA, 23 nt, artificial
  siRNA Oligomer
ucacugauuggaacaacagugau

SEQ ID NO: 5227 - RNA, 23 nt, artificial
  siRNA Oligomer
aauucagcaaggcuuucauaucc

SEQ ID NO: 5228 - RNA, 23 nt, artificial
  siRNA Oligomer
caauucagcaaggcuuucauauc

SEQ ID NO: 5229 - RNA, 23 nt, artificial
  siRNA Oligomer
ucaauucagcaaggcuuucauau

SEQ ID NO: 5230 - RNA, 23 nt, artificial
  siRNA Oligomer
uucaauucagcaaggcuuucaua

SEQ ID NO: 5231 - RNA, 23 nt, artificial
  siRNA Oligomer
guucaauucagcaaggcuuucau

SEQ ID NO: 5232 - RNA, 23 nt, artificial
  siRNA Oligomer
augaauaccugugaggauaggaa

SEQ ID NO: 5233 - RNA, 23 nt, artificial
  siRNA Oligomer
uuauuucaugauuggguaguaaa

SEQ ID NO: 5234 - RNA, 23 nt, artificial
  siRNA Oligomer
agagagccugcuaagugauuuug

SEQ ID NO: 5235 - RNA, 23 nt, artificial
  siRNA Oligomer
uuaacccuagguaagaguaaaug

SEQ ID NO: 5236 - RNA, 23 nt, artificial
  siRNA Oligomer
cuuaacccuagguaagaguaaau

SEQ ID NO: 5237 - RNA, 23 nt, artificial
  siRNA Oligomer
gcuuaacccuagguaagaguaaa

SEQ ID NO: 5238 - RNA, 23 nt, artificial
  siRNA Oligomer
agcuuaacccuagguaagaguaa

SEQ ID NO: 5239 - RNA, 23 nt, artificial
  siRNA Oligomer
agaacuguuguccuuuuuccacu

SEQ ID NO: 5240 - RNA, 23 nt, artificial
  siRNA Oligomer
uagaacuguuguccuuuuuccac

SEQ ID NO: 5241 - RNA, 23 nt, artificial
  siRNA Oligomer
guagaacuguuguccuuuuucca

SEQ ID NO: 5242 - RNA, 23 nt, artificial
  siRNA Oligomer
gcauuucagaauugcuggacugu

SEQ ID NO: 5243 - RNA, 23 nt, artificial
  siRNA Oligomer
agcauuucagaauugcuggacug

SEQ ID NO: 5244 - RNA, 23 nt, artificial
  siRNA Oligomer
cagcauuucagaauugcuggacu

SEQ ID NO: 5245 - RNA, 23 nt, artificial
  siRNA Oligomer
ccagcauuucagaauugcuggac

SEQ ID NO: 5246 - RNA, 23 nt, artificial
  siRNA Oligomer
gccagcauuucagaauugcugga

SEQ ID NO: 5247 - RNA, 23 nt, artificial
  siRNA Oligomer
guaccuacuuuugagcuuacacu

SEQ ID NO: 5248 - RNA, 23 nt, artificial
  siRNA Oligomer
cguaccuacuuuugagcuuacac

SEQ ID NO: 5249 - RNA, 23 nt, artificial
  siRNA Oligomer
ucguaccuacuuuugagcuuaca

SEQ ID NO: 5250 - RNA, 23 nt, artificial
  siRNA Oligomer
gucguaccuacuuuugagcuuac

SEQ ID NO: 5251 - RNA, 23 nt, artificial
  siRNA Oligomer
gucuuauuccaacuaaguagauc

SEQ ID NO: 5252 - RNA, 23 nt, artificial
  siRNA Oligomer
ugucuuauuccaacuaaguagau

SEQ ID NO: 5253 - RNA, 23 nt, artificial
  siRNA Oligomer
uugucuuauuccaacuaaguaga

SEQ ID NO: 5254 - RNA, 23 nt, artificial
  siRNA Oligomer
uuugucuuauuccaacuaaguag

SEQ ID NO: 5255 - RNA, 23 nt, artificial
  siRNA Oligomer
uuuugucuuauuccaacuaagua

SEQ ID NO: 5256 - RNA, 23 nt, artificial
  siRNA Oligomer
uuguguuuaagcaggagaacugc

SEQ ID NO: 5257 - RNA, 23 nt, artificial
  siRNA Oligomer
cuuguguuuaagcaggagaacug

SEQ ID NO: 5258 - RNA, 23 nt, artificial
  siRNA Oligomer
acuuguguuuaagcaggagaacu

SEQ ID NO: 5259 - RNA, 23 nt, artificial
  siRNA Oligomer
cacuuguguuuaagcaggagaac

SEQ ID NO: 5260 - RNA, 23 nt, artificial
  siRNA Oligomer
acacuuguguuuaagcaggagaa

SEQ ID NO: 5261 - RNA, 23 nt, artificial
  siRNA Oligomer
aacuugccagaauuugguuaaaa

SEQ ID NO: 5262 - RNA, 23 nt, artificial
  siRNA Oligomer
ucuaauguuuuaaagaggcaaca

SEQ ID NO: 5263 - RNA, 23 nt, artificial
  siRNA Oligomer
cucuaauguuuuaaagaggcaac

SEQ ID NO: 5264 - RNA, 23 nt, artificial
  siRNA Oligomer
acucuaauguuuuaaagaggcaa

SEQ ID NO: 5265 - RNA, 23 nt, artificial
  siRNA Oligomer
cacucuaauguuuuaaagaggca

SEQ ID NO: 5266 - RNA, 23 nt, artificial
  siRNA Oligomer
cuaaguuuucagaggauuuuuua

SEQ ID NO: 5267 - RNA, 23 nt, artificial
  siRNA Oligomer
ucuaaguuuucagaggauuuuuu

SEQ ID NO: 5268 - RNA, 23 nt, artificial
  siRNA Oligomer
cucuaaguuuucagaggauuuuu

SEQ ID NO: 5269 - RNA, 23 nt, artificial
  siRNA Oligomer
ucucuaaguuuucagaggauuuu

SEQ ID NO: 5270 - RNA, 23 nt, artificial
  siRNA Oligomer
uucucuaaguuuucagaggauuu

SEQ ID NO: 5271 - RNA, 23 nt, artificial
  siRNA Oligomer
ugguuuauaguacagccuagaga

SEQ ID NO: 5272 - RNA, 23 nt, artificial
  siRNA Oligomer
augguuuauaguacagccuagag

SEQ ID NO: 5273 - RNA, 23 nt, artificial
  siRNA Oligomer
uaugguuuauaguacagccuaga

SEQ ID NO: 5274 - RNA, 23 nt, artificial
  siRNA Oligomer
auaugguuuauaguacagccuag

SEQ ID NO: 5275 - RNA, 23 nt, artificial
  siRNA Oligomer
uccucugguuucaggagaacucu

SEQ ID NO: 5276 - RNA, 23 nt, artificial
  siRNA Oligomer
cuccucugguuucaggagaacuc

SEQ ID NO: 5277 - RNA, 23 nt, artificial
  siRNA Oligomer
ucuccucugguuucaggagaacu

SEQ ID NO: 5278 - RNA, 23 nt, artificial
  siRNA Oligomer
uucuccucugguuucaggagaac

SEQ ID NO: 5279 - RNA, 23 nt, artificial
  siRNA Oligomer
cuucuccucugguuucaggagaa

SEQ ID NO: 5280 - RNA, 23 nt, artificial
  siRNA Oligomer
uguuguuuuagaugccuuuauaa

SEQ ID NO: 5281 - RNA, 23 nt, artificial
  siRNA Oligomer
guguuguuuuagaugccuuuaua

SEQ ID NO: 5282 - RNA, 23 nt, artificial
  siRNA Oligomer
gguguuguuuuagaugccuuuau

SEQ ID NO: 5283 - RNA, 23 nt, artificial
  siRNA Oligomer
acgguguuguuuuagaugccuuu

SEQ ID NO: 5284 - RNA, 23 nt, artificial
  siRNA Oligomer
uaagugauuuugacuacugggau

SEQ ID NO: 5285 - RNA, 23 nt, artificial
  siRNA Oligomer
ggugauggcuuauggaaggcugu

SEQ ID NO: 5286 - RNA, 23 nt, artificial
  siRNA Oligomer
uggugauggcuuauggaaggcug

SEQ ID NO: 5287 - RNA, 23 nt, artificial
  siRNA Oligomer
auggugauggcuuauggaaggcu

SEQ ID NO: 5288 - RNA, 23 nt, artificial
  siRNA Oligomer
auugucaaggguaguagcuguau

SEQ ID NO: 5289 - RNA, 23 nt, artificial
  siRNA Oligomer
aauugucaaggguaguagcugua

SEQ ID NO: 5290 - RNA, 23 nt, artificial
  siRNA Oligomer
caauugucaaggguaguagcugu

SEQ ID NO: 5291 - RNA, 23 nt, artificial
  siRNA Oligomer
cgcuucuccucugguuucaggag

SEQ ID NO: 5292 - RNA, 23 nt, artificial
  siRNA Oligomer
ucgcuucuccucugguuucagga

SEQ ID NO: 5293 - RNA, 23 nt, artificial
  siRNA Oligomer
gucgcuucuccucugguuucagg

SEQ ID NO: 5294 - RNA, 23 nt, artificial
  siRNA Oligomer
ggucgcuucuccucugguuucag

SEQ ID NO: 5295 - RNA, 23 nt, artificial
  siRNA Oligomer
aggucgcuucuccucugguuuca

SEQ ID NO: 5296 - RNA, 23 nt, artificial
  siRNA Oligomer
aucaauguuguuuugcaugucua

SEQ ID NO: 5297 - RNA, 23 nt, artificial
  siRNA Oligomer
uucuagcgucguaccuacuuuug

SEQ ID NO: 5298 - RNA, 23 nt, artificial
  siRNA Oligomer
auucuagcgucguaccuacuuuu

SEQ ID NO: 5299 - RNA, 23 nt, artificial
  siRNA Oligomer
ccagauaaccaugcaugcaccca

SEQ ID NO: 5300 - RNA, 23 nt, artificial
  siRNA Oligomer
uccagauaaccaugcaugcaccc

SEQ ID NO: 5301 - RNA, 23 nt, artificial
  siRNA Oligomer
guccagauaaccaugcaugcacc

SEQ ID NO: 5302 - RNA, 23 nt, artificial
  siRNA Oligomer
cguccagauaaccaugcaugcac

SEQ ID NO: 5303 - RNA, 23 nt, artificial
  siRNA Oligomer
cuuccaaaagcccacaccaccag

SEQ ID NO: 5304 - RNA, 23 nt, artificial
  siRNA Oligomer
acuuccaaaagcccacaccacca

SEQ ID NO: 5305 - RNA, 23 nt, artificial
  siRNA Oligomer
aacuuccaaaagcccacaccacc

SEQ ID NO: 5306 - RNA, 23 nt, artificial
  siRNA Oligomer
aaacuuccaaaagcccacaccac

SEQ ID NO: 5307 - RNA, 23 nt, artificial
  siRNA Oligomer
aaaacuuccaaaagcccacacca

SEQ ID NO: 5308 - RNA, 23 nt, artificial
  siRNA Oligomer
aguuaucuuugacucucuugccu

SEQ ID NO: 5309 - RNA, 23 nt, artificial
  siRNA Oligomer
cuuaaguguugaauacugucuuu

SEQ ID NO: 5310 - RNA, 23 nt, artificial
  siRNA Oligomer
ucuuaaguguugaauacugucuu

SEQ ID NO: 5311 - RNA, 23 nt, artificial
  siRNA Oligomer
uucuuaaguguugaauacugucu

SEQ ID NO: 5312 - RNA, 23 nt, artificial
  siRNA Oligomer
guucuuaaguguugaauacuguc

SEQ ID NO: 5313 - RNA, 23 nt, artificial
  siRNA Oligomer
uguucuuaaguguugaauacugu

SEQ ID NO: 5314 - RNA, 23 nt, artificial
  siRNA Oligomer
cauagcaacugcagcuaacaggc

SEQ ID NO: 5315 - RNA, 23 nt, artificial
  siRNA Oligomer
ucauagcaacugcagcuaacagg

SEQ ID NO: 5316 - RNA, 23 nt, artificial
  siRNA Oligomer
uucauagcaacugcagcuaacag

SEQ ID NO: 5317 - RNA, 23 nt, artificial
  siRNA Oligomer
auucauagcaacugcagcuaaca

SEQ ID NO: 5318 - RNA, 23 nt, artificial
  siRNA Oligomer
cauucauagcaacugcagcuaac

SEQ ID NO: 5319 - RNA, 23 nt, artificial
  siRNA Oligomer
gaacccggccagcauuucagaau

SEQ ID NO: 5320 - RNA, 23 nt, artificial
  siRNA Oligomer
ggccaagauaaaucaauguuguu

SEQ ID NO: 5321 - RNA, 23 nt, artificial
  siRNA Oligomer
auauuacggcaauaauggaacug

SEQ ID NO: 5322 - RNA, 23 nt, artificial
  siRNA Oligomer
aauauuacggcaauaauggaacu

SEQ ID NO: 5323 - RNA, 23 nt, artificial
  siRNA Oligomer
aaauauuacggcaauaauggaac

SEQ ID NO: 5324 - RNA, 23 nt, artificial
  siRNA Oligomer
gaaauauuacggcaauaauggaa

SEQ ID NO: 5325 - RNA, 23 nt, artificial
  siRNA Oligomer
agaaauauuacggcaauaaugga

SEQ ID NO: 5326 - RNA, 23 nt, artificial
  siRNA Oligomer
uaaaaagcuggauaggauugugu

SEQ ID NO: 5327 - RNA, 23 nt, artificial
  siRNA Oligomer
auguuguuccugaacccaaccuc

SEQ ID NO: 5328 - RNA, 23 nt, artificial
  siRNA Oligomer
uauguuguuccugaacccaaccu

SEQ ID NO: 5329 - RNA, 23 nt, artificial
  siRNA Oligomer
uuauguuguuccugaacccaacc

SEQ ID NO: 5330 - RNA, 23 nt, artificial
  siRNA Oligomer
auuauguuguuccugaacccaac

SEQ ID NO: 5331 - RNA, 23 nt, artificial
  siRNA Oligomer
gauuauguuguuccugaacccaa

SEQ ID NO: 5332 - RNA, 23 nt, artificial
  siRNA Oligomer
gguuucaggagaacucugauccu

SEQ ID NO: 5333 - RNA, 23 nt, artificial
  siRNA Oligomer
ugguuucaggagaacucugaucc

SEQ ID NO: 5334 - RNA, 23 nt, artificial
  siRNA Oligomer
cugguuucaggagaacucugauc

SEQ ID NO: 5335 - RNA, 23 nt, artificial
  siRNA Oligomer
ucugguuucaggagaacucugau

SEQ ID NO: 5336 - RNA, 23 nt, artificial
  siRNA Oligomer
cucugguuucaggagaacucuga

SEQ ID NO: 5337 - RNA, 23 nt, artificial
  siRNA Oligomer
ccaugguugcaacuggcaguuug

SEQ ID NO: 5338 - RNA, 23 nt, artificial
  siRNA Oligomer
accaugguugcaacuggcaguuu

SEQ ID NO: 5339 - RNA, 23 nt, artificial
  siRNA Oligomer
gaccaugguugcaacuggcaguu

SEQ ID NO: 5340 - RNA, 23 nt, artificial
  siRNA Oligomer
ugaccaugguugcaacuggcagu

SEQ ID NO: 5341 - RNA, 23 nt, artificial
  siRNA Oligomer
ugugauccuguuacugauacuau

SEQ ID NO: 5342 - RNA, 23 nt, artificial
  siRNA Oligomer
auuauuucaugauuggguaguaa

SEQ ID NO: 5343 - RNA, 23 nt, artificial
  siRNA Oligomer
guuuuuagacaggaagguaggau

SEQ ID NO: 5344 - RNA, 23 nt, artificial
  siRNA Oligomer
gguuuuuagacaggaagguagga

SEQ ID NO: 5345 - RNA, 23 nt, artificial
  siRNA Oligomer
ggguuuuuagacaggaagguagg

SEQ ID NO: 5346 - RNA, 23 nt, artificial
  siRNA Oligomer
aggguuuuuagacaggaagguag

SEQ ID NO: 5347 - RNA, 23 nt, artificial
  siRNA Oligomer
agguuuccugcccuagcuauuag

SEQ ID NO: 5348 - RNA, 23 nt, artificial
  siRNA Oligomer
cagguuuccugcccuagcuauua

SEQ ID NO: 5349 - RNA, 23 nt, artificial
  siRNA Oligomer
ucagguuuccugcccuagcuauu

SEQ ID NO: 5350 - RNA, 23 nt, artificial
  siRNA Oligomer
uucagguuuccugcccuagcuau

SEQ ID NO: 5351 - RNA, 23 nt, artificial
  siRNA Oligomer
auucagguuuccugcccuagcua

SEQ ID NO: 5352 - RNA, 23 nt, artificial
  siRNA Oligomer
caacaauguucaauucagcaagg

SEQ ID NO: 5353 - RNA, 23 nt, artificial
  siRNA Oligomer
ucaacaauguucaauucagcaag

SEQ ID NO: 5354 - RNA, 23 nt, artificial
  siRNA Oligomer
cucaacaauguucaauucagcaa

SEQ ID NO: 5355 - RNA, 23 nt, artificial
  siRNA Oligomer
acucaacaauguucaauucagca

SEQ ID NO: 5356 - RNA, 23 nt, artificial
  siRNA Oligomer
cacucaacaauguucaauucagc

SEQ ID NO: 5357 - RNA, 23 nt, artificial
  siRNA Oligomer
ccucuuuucaguauuacaugugc

SEQ ID NO: 5358 - RNA, 23 nt, artificial
  siRNA Oligomer
uccucuuuucaguauuacaugug

SEQ ID NO: 5359 - RNA, 23 nt, artificial
  siRNA Oligomer
auccucuuuucaguauuacaugu

SEQ ID NO: 5360 - RNA, 23 nt, artificial
  siRNA Oligomer
uauccucuuuucaguauuacaug

SEQ ID NO: 5361 - RNA, 23 nt, artificial
  siRNA Oligomer
cuauccucuuuucaguauuacau

SEQ ID NO: 5362 - RNA, 23 nt, artificial
  siRNA Oligomer
aguguugaauacugucuuuaaac

SEQ ID NO: 5363 - RNA, 23 nt, artificial
  siRNA Oligomer
aaguguugaauacugucuuuaaa

SEQ ID NO: 5364 - RNA, 23 nt, artificial
  siRNA Oligomer
uaaguguugaauacugucuuuaa

SEQ ID NO: 5365 - RNA, 23 nt, artificial
  siRNA Oligomer
uuaaguguugaauacugucuuua

SEQ ID NO: 5366 - RNA, 23 nt, artificial
  siRNA Oligomer
gaacaacagugauugaagggucc

SEQ ID NO: 5367 - RNA, 23 nt, artificial
  siRNA Oligomer
ucuauccucuuuucaguauuaca

SEQ ID NO: 5368 - RNA, 23 nt, artificial
  siRNA Oligomer
ggaaauuaguucugagaucuagu

SEQ ID NO: 5369 - RNA, 23 nt, artificial
  siRNA Oligomer
aggaaauuaguucugagaucuag

SEQ ID NO: 5370 - RNA, 23 nt, artificial
  siRNA Oligomer
uaggaaauuaguucugagaucua

SEQ ID NO: 5371 - RNA, 23 nt, artificial
  siRNA Oligomer
auaggaaauuaguucugagaucu

SEQ ID NO: 5372 - RNA, 23 nt, artificial
  siRNA Oligomer
uuguccuuuuuccacuaacaguu

SEQ ID NO: 5373 - RNA, 23 nt, artificial
  siRNA Oligomer
uuuucuggccuuuggagaaguga

SEQ ID NO: 5374 - RNA, 23 nt, artificial
  siRNA Oligomer
auuuucuggccuuuggagaagug

SEQ ID NO: 5375 - RNA, 23 nt, artificial
  siRNA Oligomer
gauuuucuggccuuuggagaagu

SEQ ID NO: 5376 - RNA, 23 nt, artificial
  siRNA Oligomer
agucccucucugauucacuuagu

SEQ ID NO: 5377 - RNA, 23 nt, artificial
  siRNA Oligomer
uagucccucucugauucacuuag

SEQ ID NO: 5378 - RNA, 23 nt, artificial
  siRNA Oligomer
cuagucccucucugauucacuua

SEQ ID NO: 5379 - RNA, 23 nt, artificial
  siRNA Oligomer
ucuagucccucucugauucacuu

SEQ ID NO: 5380 - RNA, 23 nt, artificial
  siRNA Oligomer
ucuuuauagaauugggccaagau

SEQ ID NO: 5381 - RNA, 23 nt, artificial
  siRNA Oligomer
guuucaggagaacucugauccuc

SEQ ID NO: 5382 - RNA, 23 nt, artificial
  siRNA Oligomer
ccuagcuauuagcuccacuucac

SEQ ID NO: 5383 - RNA, 23 nt, artificial
  siRNA Oligomer
acucaaauuugaaggguuuuuag

SEQ ID NO: 5384 - RNA, 23 nt, artificial
  siRNA Oligomer
cuaacaggcugauuuucuggccu

SEQ ID NO: 5385 - RNA, 23 nt, artificial
  siRNA Oligomer
gcuaacaggcugauuuucuggcc

SEQ ID NO: 5386 - RNA, 23 nt, artificial
  siRNA Oligomer
agcuaacaggcugauuuucuggc

SEQ ID NO: 5387 - RNA, 23 nt, artificial
  siRNA Oligomer
cagcuaacaggcugauuuucugg

SEQ ID NO: 5388 - RNA, 23 nt, artificial
  siRNA Oligomer
gcagcuaacaggcugauuuucug

SEQ ID NO: 5389 - RNA, 23 nt, artificial
  siRNA Oligomer
caauguucaauucagcaaggcuu

SEQ ID NO: 5390 - RNA, 23 nt, artificial
  siRNA Oligomer
acaauguucaauucagcaaggcu

SEQ ID NO: 5391 - RNA, 23 nt, artificial
  siRNA Oligomer
aacaauguucaauucagcaaggc

SEQ ID NO: 5392 - RNA, 23 nt, artificial
  siRNA Oligomer
ugguguuacugaaaaacaggugu

SEQ ID NO: 5393 - RNA, 23 nt, artificial
  siRNA Oligomer
cugguguuacugaaaaacaggug

SEQ ID NO: 5394 - RNA, 23 nt, artificial
  siRNA Oligomer
ccugguguuacugaaaaacaggu

SEQ ID NO: 5395 - RNA, 23 nt, artificial
  siRNA Oligomer
guuccugaacccaaccucaacga

SEQ ID NO: 5396 - RNA, 23 nt, artificial
  siRNA Oligomer
uguuccugaacccaaccucaacg

SEQ ID NO: 5397 - RNA, 23 nt, artificial
  siRNA Oligomer
uuguuccugaacccaaccucaac

SEQ ID NO: 5398 - RNA, 23 nt, artificial
  siRNA Oligomer
guuguuccugaacccaaccucaa

SEQ ID NO: 5399 - RNA, 23 nt, artificial
  siRNA Oligomer
uguuguuccugaacccaaccuca

SEQ ID NO: 5400 - RNA, 23 nt, artificial
  siRNA Oligomer
uuucaggagaacucugauccuca

SEQ ID NO: 5401 - RNA, 23 nt, artificial
  siRNA Oligomer
caacuugccagaauuugguuaaa

SEQ ID NO: 5402 - RNA, 23 nt, artificial
  siRNA Oligomer
ugcagcuaacaggcugauuuucu

SEQ ID NO: 5403 - RNA, 23 nt, artificial
  siRNA Oligomer
cugcagcuaacaggcugauuuuc

SEQ ID NO: 5404 - RNA, 23 nt, artificial
  siRNA Oligomer
acugcagcuaacaggcugauuuu

SEQ ID NO: 5405 - RNA, 23 nt, artificial
  siRNA Oligomer
cccaaauguagucucuuuucuuu

SEQ ID NO: 5406 - RNA, 23 nt, artificial
  siRNA Oligomer
ccccaaauguagucucuuuucuu

SEQ ID NO: 5407 - RNA, 23 nt, artificial
  siRNA Oligomer
accccaaauguagucucuuuucu

SEQ ID NO: 5408 - RNA, 23 nt, artificial
  siRNA Oligomer
aaccccaaauguagucucuuuuc

SEQ ID NO: 5409 - RNA, 23 nt, artificial
  siRNA Oligomer
aaaccccaaauguagucucuuuu

SEQ ID NO: 5410 - RNA, 23 nt, artificial
  siRNA Oligomer
accaugcaugcacccagauuuuu

SEQ ID NO: 5411 - RNA, 23 nt, artificial
  siRNA Oligomer
ggaacugcuucacuguuucuugg

SEQ ID NO: 5412 - RNA, 23 nt, artificial
  siRNA Oligomer
uggaacugcuucacuguuucuug

SEQ ID NO: 5413 - RNA, 23 nt, artificial
  siRNA Oligomer
auggaacugcuucacuguuucuu

SEQ ID NO: 5414 - RNA, 23 nt, artificial
  siRNA Oligomer
aauggaacugcuucacuguuucu

SEQ ID NO: 5415 - RNA, 23 nt, artificial
  siRNA Oligomer
uaauggaacugcuucacuguuuc

SEQ ID NO: 5416 - RNA, 23 nt, artificial
  siRNA Oligomer
ccaaagguucacuguguuucugc

SEQ ID NO: 5417 - RNA, 23 nt, artificial
  siRNA Oligomer
uccaaagguucacuguguuucug

SEQ ID NO: 5418 - RNA, 23 nt, artificial
  siRNA Oligomer
cuccaaagguucacuguguuucu

SEQ ID NO: 5419 - RNA, 23 nt, artificial
  siRNA Oligomer
gcuccaaagguucacuguguuuc

SEQ ID NO: 5420 - RNA, 23 nt, artificial
  siRNA Oligomer
agcuccaaagguucacuguguuu

SEQ ID NO: 5421 - RNA, 23 nt, artificial
  siRNA Oligomer
gaaccauuucaccauggcagugu

SEQ ID NO: 5422 - RNA, 23 nt, artificial
  siRNA Oligomer
ugaaccauuucaccauggcagug

SEQ ID NO: 5423 - RNA, 23 nt, artificial
  siRNA Oligomer
augaaccauuucaccauggcagu

SEQ ID NO: 5424 - RNA, 23 nt, artificial
  siRNA Oligomer
gaugaaccauuucaccauggcag

SEQ ID NO: 5425 - RNA, 23 nt, artificial
  siRNA Oligomer
acuaaacuugguugcucaaaggu

SEQ ID NO: 5426 - RNA, 23 nt, artificial
  siRNA Oligomer
aacuaaacuugguugcucaaagg

SEQ ID NO: 5427 - RNA, 23 nt, artificial
  siRNA Oligomer
aaacuaaacuugguugcucaaag

SEQ ID NO: 5428 - RNA, 23 nt, artificial
  siRNA Oligomer
caaacuaaacuugguugcucaaa

SEQ ID NO: 5429 - RNA, 23 nt, artificial
  siRNA Oligomer
gcaaacuaaacuugguugcucaa

SEQ ID NO: 5430 - RNA, 23 nt, artificial
  siRNA Oligomer
auuuucugcauagaucccauuuu

SEQ ID NO: 5431 - RNA, 23 nt, artificial
  siRNA Oligomer
gauuuucugcauagaucccauuu

SEQ ID NO: 5432 - RNA, 23 nt, artificial
  siRNA Oligomer
agauuuucugcauagaucccauu

SEQ ID NO: 5433 - RNA, 23 nt, artificial
  siRNA Oligomer
uagauuuucugcauagaucccau

SEQ ID NO: 5434 - RNA, 23 nt, artificial
  siRNA Oligomer
auuuacgaagucugcauuggcua

SEQ ID NO: 5435 - RNA, 23 nt, artificial
  siRNA Oligomer
gaucauuaucucuuuccuuuuuu

SEQ ID NO: 5436 - RNA, 23 nt, artificial
  siRNA Oligomer
agaucauuaucucuuuccuuuuu

SEQ ID NO: 5437 - RNA, 23 nt, artificial
  siRNA Oligomer
uagaucauuaucucuuuccuuuu

SEQ ID NO: 5438 - RNA, 23 nt, artificial
  siRNA Oligomer
guagaucauuaucucuuuccuuu

SEQ ID NO: 5439 - RNA, 23 nt, artificial
  siRNA Oligomer
aguagaucauuaucucuuuccuu

SEQ ID NO: 5440 - RNA, 23 nt, artificial
  siRNA Oligomer
gcauuggcuauggagauaugguu

SEQ ID NO: 5441 - RNA, 23 nt, artificial
  siRNA Oligomer
gguaguagcuguauacuaccacu

SEQ ID NO: 5442 - RNA, 23 nt, artificial
  siRNA Oligomer
ccaauugucaaggguaguagcug

SEQ ID NO: 5443 - RNA, 23 nt, artificial
  siRNA Oligomer
cccaauugucaaggguaguagcu

SEQ ID NO: 5444 - RNA, 23 nt, artificial
  siRNA Oligomer
ccccaauugucaaggguaguagc

SEQ ID NO: 5445 - RNA, 23 nt, artificial
  siRNA Oligomer
accccaauugucaaggguaguag

SEQ ID NO: 5446 - RNA, 23 nt, artificial
  siRNA Oligomer
aaccccaauugucaaggguagua

SEQ ID NO: 5447 - RNA, 23 nt, artificial
  siRNA Oligomer
cuuaguaaucuauccucuuuuca

SEQ ID NO: 5448 - RNA, 23 nt, artificial
  siRNA Oligomer
acuuaguaaucuauccucuuuuc

SEQ ID NO: 5449 - RNA, 23 nt, artificial
  siRNA Oligomer
cacuuaguaaucuauccucuuuu

SEQ ID NO: 5450 - RNA, 23 nt, artificial
  siRNA Oligomer
ucacuuaguaaucuauccucuuu

SEQ ID NO: 5451 - RNA, 23 nt, artificial
  siRNA Oligomer
uucacuuaguaaucuauccucuu

SEQ ID NO: 5452 - RNA, 23 nt, artificial
  siRNA Oligomer
cuggaguugucaccacugacugg

SEQ ID NO: 5453 - RNA, 23 nt, artificial
  siRNA Oligomer
ccuggaguugucaccacugacug

SEQ ID NO: 5454 - RNA, 23 nt, artificial
  siRNA Oligomer
uccuggaguugucaccacugacu

SEQ ID NO: 5455 - RNA, 23 nt, artificial
  siRNA Oligomer
guccuggaguugucaccacugac

SEQ ID NO: 5456 - RNA, 23 nt, artificial
  siRNA Oligomer
uguccuggaguugucaccacuga

SEQ ID NO: 5457 - RNA, 23 nt, artificial
  siRNA Oligomer
caguuugagcagcaagaacccgg

SEQ ID NO: 5458 - RNA, 23 nt, artificial
  siRNA Oligomer
cuacugggauuauguuguuccug

SEQ ID NO: 5459 - RNA, 23 nt, artificial
  siRNA Oligomer
acuacugggauuauguuguuccu

SEQ ID NO: 5460 - RNA, 23 nt, artificial
  siRNA Oligomer
gacuacugggauuauguuguucc

SEQ ID NO: 5461 - RNA, 23 nt, artificial
  siRNA Oligomer
ugacuacugggauuauguuguuc

SEQ ID NO: 5462 - RNA, 23 nt, artificial
  siRNA Oligomer
uugacuacugggauuauguuguu

SEQ ID NO: 5463 - RNA, 23 nt, artificial
  siRNA Oligomer
uagggacagauguauucauccug

SEQ ID NO: 5464 - RNA, 23 nt, artificial
  siRNA Oligomer
guagggacagauguauucauccu

SEQ ID NO: 5465 - RNA, 23 nt, artificial
  siRNA Oligomer
cguagggacagauguauucaucc

SEQ ID NO: 5466 - RNA, 23 nt, artificial
  siRNA Oligomer
caaucuuuauagaauugggccaa

SEQ ID NO: 5467 - RNA, 23 nt, artificial
  siRNA Oligomer
ccaaucuuuauagaauugggcca

SEQ ID NO: 5468 - RNA, 23 nt, artificial
  siRNA Oligomer
gccaaucuuuauagaauugggcc

SEQ ID NO: 5469 - RNA, 23 nt, artificial
  siRNA Oligomer
agccaaucuuuauagaauugggc

SEQ ID NO: 5470 - RNA, 23 nt, artificial
  siRNA Oligomer
aagccaaucuuuauagaauuggg

SEQ ID NO: 5471 - RNA, 23 nt, artificial
  siRNA Oligomer
guuguccuuuuuccacuaacagu

SEQ ID NO: 5472 - RNA, 23 nt, artificial
  siRNA Oligomer
guccuaaaaagggaaaauauaua

SEQ ID NO: 5473 - RNA, 23 nt, artificial
  siRNA Oligomer
auuuagccuaucaaaacuuccaa

SEQ ID NO: 5474 - RNA, 23 nt, artificial
  siRNA Oligomer
cuaaacucuucaaaugcuuggaa

SEQ ID NO: 5475 - RNA, 23 nt, artificial
  siRNA Oligomer
acuaaacucuucaaaugcuugga

SEQ ID NO: 5476 - RNA, 23 nt, artificial
  siRNA Oligomer
aacuaaacucuucaaaugcuugg

SEQ ID NO: 5477 - RNA, 23 nt, artificial
  siRNA Oligomer
aaacuaaacucuucaaaugcuug

SEQ ID NO: 5478 - RNA, 23 nt, artificial
  siRNA Oligomer
caaacuaaacucuucaaaugcuu

SEQ ID NO: 5479 - RNA, 23 nt, artificial
  siRNA Oligomer
ugcgagguuguguuaugcacgug

SEQ ID NO: 5480 - RNA, 23 nt, artificial
  siRNA Oligomer
uugcgagguuguguuaugcacgu

SEQ ID NO: 5481 - RNA, 23 nt, artificial
  siRNA Oligomer
ucaacuugccagaauuugguuaa

SEQ ID NO: 5482 - RNA, 23 nt, artificial
  siRNA Oligomer
caaaagcuuguggugccauuuca

SEQ ID NO: 5483 - RNA, 23 nt, artificial
  siRNA Oligomer
acaaaagcuuguggugccauuuc

SEQ ID NO: 5484 - RNA, 23 nt, artificial
  siRNA Oligomer
aacaaaagcuuguggugccauuu

SEQ ID NO: 5485 - RNA, 23 nt, artificial
  siRNA Oligomer
caacaaaagcuuguggugccauu

SEQ ID NO: 5486 - RNA, 23 nt, artificial
  siRNA Oligomer
gcaaggcuuucauauccuugcug

SEQ ID NO: 5487 - RNA, 23 nt, artificial
  siRNA Oligomer
agcaaggcuuucauauccuugcu

SEQ ID NO: 5488 - RNA, 23 nt, artificial
  siRNA Oligomer
cagcaaggcuuucauauccuugc

SEQ ID NO: 5489 - RNA, 23 nt, artificial
  siRNA Oligomer
ucagcaaggcuuucauauccuug

SEQ ID NO: 5490 - RNA, 23 nt, artificial
  siRNA Oligomer
uucagcaaggcuuucauauccuu

SEQ ID NO: 5491 - RNA, 23 nt, artificial
  siRNA Oligomer
aagauacuacaaagccaaucuuu

SEQ ID NO: 5492 - RNA, 23 nt, artificial
  siRNA Oligomer
ucagcucaggauuucgacuuguu

SEQ ID NO: 5493 - RNA, 23 nt, artificial
  siRNA Oligomer
gcaguguuaucucaucucugggc

SEQ ID NO: 5494 - RNA, 23 nt, artificial
  siRNA Oligomer
ggcaguguuaucucaucucuggg

SEQ ID NO: 5495 - RNA, 23 nt, artificial
  siRNA Oligomer
uggcaguguuaucucaucucugg

SEQ ID NO: 5496 - RNA, 23 nt, artificial
  siRNA Oligomer
auggcaguguuaucucaucucug

SEQ ID NO: 5497 - RNA, 23 nt, artificial
  siRNA Oligomer
cauggcaguguuaucucaucucu

SEQ ID NO: 5498 - RNA, 23 nt, artificial
  siRNA Oligomer
aucuuuauagaauugggccaaga

SEQ ID NO: 5499 - RNA, 23 nt, artificial
  siRNA Oligomer
aaucuuuauagaauugggccaag

SEQ ID NO: 5500 - RNA, 23 nt, artificial
  siRNA Oligomer
cccauuuuuguacagaauugaau

SEQ ID NO: 5501 - RNA, 23 nt, artificial
  siRNA Oligomer
ucccauuuuuguacagaauugaa

SEQ ID NO: 5502 - RNA, 23 nt, artificial
  siRNA Oligomer
aucccauuuuuguacagaauuga

SEQ ID NO: 5503 - RNA, 23 nt, artificial
  siRNA Oligomer
gaucccauuuuuguacagaauug

SEQ ID NO: 5504 - RNA, 23 nt, artificial
  siRNA Oligomer
agaucccauuuuuguacagaauu

SEQ ID NO: 5505 - RNA, 23 nt, artificial
  siRNA Oligomer
guguguaguugauuacucuucca

SEQ ID NO: 5506 - RNA, 23 nt, artificial
  siRNA Oligomer
uguguguaguugauuacucuucc

SEQ ID NO: 5507 - RNA, 23 nt, artificial
  siRNA Oligomer
uuguguguaguugauuacucuuc

SEQ ID NO: 5508 - RNA, 23 nt, artificial
  siRNA Oligomer
uuuguguguaguugauuacucuu

SEQ ID NO: 5509 - RNA, 23 nt, artificial
  siRNA Oligomer
uuuuguguguaguugauuacucu

SEQ ID NO: 5510 - RNA, 23 nt, artificial
  siRNA Oligomer
guaaaugagaaauauuacggcaa

SEQ ID NO: 5511 - RNA, 23 nt, artificial
  siRNA Oligomer
augcacccagauuuuuuccaccu

SEQ ID NO: 5512 - RNA, 23 nt, artificial
  siRNA Oligomer
caugcacccagauuuuuuccacc

SEQ ID NO: 5513 - RNA, 23 nt, artificial
  siRNA Oligomer
uagaucccauuuuuguacagaau

SEQ ID NO: 5514 - RNA, 23 nt, artificial
  siRNA Oligomer
auagaucccauuuuuguacagaa

SEQ ID NO: 5515 - RNA, 23 nt, artificial
  siRNA Oligomer
cagaauugcuggacuguggcuau

SEQ ID NO: 5516 - RNA, 23 nt, artificial
  siRNA Oligomer
ucagaauugcuggacuguggcua

SEQ ID NO: 5517 - RNA, 23 nt, artificial
  siRNA Oligomer
uucagaauugcuggacuguggcu

SEQ ID NO: 5518 - RNA, 23 nt, artificial
  siRNA Oligomer
uuucagaauugcuggacuguggc

SEQ ID NO: 5519 - RNA, 23 nt, artificial
  siRNA Oligomer
auuucagaauugcuggacugugg

SEQ ID NO: 5520 - RNA, 23 nt, artificial
  siRNA Oligomer
uuugacuacugggauuauguugu

SEQ ID NO: 5521 - RNA, 23 nt, artificial
  siRNA Oligomer
uuuugacuacugggauuauguug

SEQ ID NO: 5522 - RNA, 23 nt, artificial
  siRNA Oligomer
auuuugacuacugggauuauguu

SEQ ID NO: 5523 - RNA, 23 nt, artificial
  siRNA Oligomer
gagaauugcucaagauguccugc

SEQ ID NO: 5524 - RNA, 23 nt, artificial
  siRNA Oligomer
agagaauugcucaagauguccug

SEQ ID NO: 5525 - RNA, 23 nt, artificial
  siRNA Oligomer
cagagaauugcucaagauguccu

SEQ ID NO: 5526 - RNA, 23 nt, artificial
  siRNA Oligomer
uguagaacuguuguccuuuuucc

SEQ ID NO: 5527 - RNA, 23 nt, artificial
  siRNA Oligomer
auguagaacuguuguccuuuuuc

SEQ ID NO: 5528 - RNA, 23 nt, artificial
  siRNA Oligomer
gauguagaacuguuguccuuuuu

SEQ ID NO: 5529 - RNA, 23 nt, artificial
  siRNA Oligomer
cgauguagaacuguuguccuuuu

SEQ ID NO: 5530 - RNA, 23 nt, artificial
  siRNA Oligomer
ccauuuuuguacagaauugaaug

SEQ ID NO: 5531 - RNA, 23 nt, artificial
  siRNA Oligomer
cuuaaucucagaugaaccauuuc

SEQ ID NO: 5532 - RNA, 23 nt, artificial
  siRNA Oligomer
gcuuaaucucagaugaaccauuu

SEQ ID NO: 5533 - RNA, 23 nt, artificial
  siRNA Oligomer
ugcuuaaucucagaugaaccauu

SEQ ID NO: 5534 - RNA, 23 nt, artificial
  siRNA Oligomer
gaauuugguuaaaaugcuggaga

SEQ ID NO: 5535 - RNA, 23 nt, artificial
  siRNA Oligomer
agaauuugguuaaaaugcuggag

SEQ ID NO: 5536 - RNA, 23 nt, artificial
  siRNA Oligomer
cagaauuugguuaaaaugcugga

SEQ ID NO: 5537 - RNA, 23 nt, artificial
  siRNA Oligomer
ccagaauuugguuaaaaugcugg

SEQ ID NO: 5538 - RNA, 23 nt, artificial
  siRNA Oligomer
uuuuuagacaggaagguaggauu

SEQ ID NO: 5539 - RNA, 23 nt, artificial
  siRNA Oligomer
uugaaguaucucuccuuaacccc

SEQ ID NO: 5540 - RNA, 23 nt, artificial
  siRNA Oligomer
auugaaguaucucuccuuaaccc

SEQ ID NO: 5541 - RNA, 23 nt, artificial
  siRNA Oligomer
aauugaaguaucucuccuuaacc

SEQ ID NO: 5542 - RNA, 23 nt, artificial
  siRNA Oligomer
gaauugaaguaucucuccuuaac

SEQ ID NO: 5543 - RNA, 23 nt, artificial
  siRNA Oligomer
ggaauugaaguaucucuccuuaa

SEQ ID NO: 5544 - RNA, 23 nt, artificial
  siRNA Oligomer
cuuugacucucuugccuguuaug

SEQ ID NO: 5545 - RNA, 23 nt, artificial
  siRNA Oligomer
ucuuugacucucuugccuguuau

SEQ ID NO: 5546 - RNA, 23 nt, artificial
  siRNA Oligomer
aucuuugacucucuugccuguua

SEQ ID NO: 5547 - RNA, 23 nt, artificial
  siRNA Oligomer
uaucuuugacucucuugccuguu

SEQ ID NO: 5548 - RNA, 23 nt, artificial
  siRNA Oligomer
uuaucuuugacucucuugccugu

SEQ ID NO: 5549 - RNA, 23 nt, artificial
  siRNA Oligomer
uguggcuaucacccagagagccu

SEQ ID NO: 5550 - RNA, 23 nt, artificial
  siRNA Oligomer
cuguggcuaucacccagagagcc

SEQ ID NO: 5551 - RNA, 23 nt, artificial
  siRNA Oligomer
acuguggcuaucacccagagagc

SEQ ID NO: 5552 - RNA, 23 nt, artificial
  siRNA Oligomer
gacuguggcuaucacccagagag

SEQ ID NO: 5553 - RNA, 23 nt, artificial
  siRNA Oligomer
ggacuguggcuaucacccagaga

SEQ ID NO: 5554 - RNA, 23 nt, artificial
  siRNA Oligomer
auaaaggccuuauuuuuugucuu

SEQ ID NO: 5555 - RNA, 23 nt, artificial
  siRNA Oligomer
caguguuaucucaucucugggcu

SEQ ID NO: 5556 - RNA, 23 nt, artificial
  siRNA Oligomer
ugcaacuggcaguuugagcagca

SEQ ID NO: 5557 - RNA, 23 nt, artificial
  siRNA Oligomer
uugcaacuggcaguuugagcagc

SEQ ID NO: 5558 - RNA, 23 nt, artificial
  siRNA Oligomer
gauuauuucaugauuggguagua

SEQ ID NO: 5559 - RNA, 23 nt, artificial
  siRNA Oligomer
agaugccuuuauaagcucaguuu

SEQ ID NO: 5560 - RNA, 23 nt, artificial
  siRNA Oligomer
uagaugccuuuauaagcucaguu

SEQ ID NO: 5561 - RNA, 23 nt, artificial
  siRNA Oligomer
uuagaugccuuuauaagcucagu

SEQ ID NO: 5562 - RNA, 23 nt, artificial
  siRNA Oligomer
uuuagaugccuuuauaagcucag

SEQ ID NO: 5563 - RNA, 23 nt, artificial
  siRNA Oligomer
uuuuagaugccuuuauaagcuca

SEQ ID NO: 5564 - RNA, 23 nt, artificial
  siRNA Oligomer
guuaagcuccaaagguucacugu

SEQ ID NO: 5565 - RNA, 23 nt, artificial
  siRNA Oligomer
uguuaagcuccaaagguucacug

SEQ ID NO: 5566 - RNA, 23 nt, artificial
  siRNA Oligomer
uuguuaagcuccaaagguucacu

SEQ ID NO: 5567 - RNA, 23 nt, artificial
  siRNA Oligomer
auuguuaagcuccaaagguucac

SEQ ID NO: 5568 - RNA, 23 nt, artificial
  siRNA Oligomer
uauuguuaagcuccaaagguuca

SEQ ID NO: 5569 - RNA, 23 nt, artificial
  siRNA Oligomer
gaguuuaguuuguuagaacacug

SEQ ID NO: 5570 - RNA, 23 nt, artificial
  siRNA Oligomer
aguuuaguuuguuagaacacugg

SEQ ID NO: 5571 - RNA, 23 nt, artificial
  siRNA Oligomer
guuuaguuuguuagaacacuggc

SEQ ID NO: 5572 - RNA, 23 nt, artificial
  siRNA Oligomer
uuuaguuuguuagaacacuggcu

SEQ ID NO: 5573 - RNA, 23 nt, artificial
  siRNA Oligomer
uuaguuuguuagaacacuggcua

SEQ ID NO: 5574 - RNA, 23 nt, artificial
  siRNA Oligomer
uaguuuguuagaacacuggcuaa

SEQ ID NO: 5575 - RNA, 23 nt, artificial
  siRNA Oligomer
uggguucaggaacaacauaaucc

SEQ ID NO: 5576 - RNA, 23 nt, artificial
  siRNA Oligomer
ggguucaggaacaacauaauccc

SEQ ID NO: 5577 - RNA, 23 nt, artificial
  siRNA Oligomer
gguucaggaacaacauaauccca

SEQ ID NO: 5578 - RNA, 23 nt, artificial
  siRNA Oligomer
guucaggaacaacauaaucccag

SEQ ID NO: 5579 - RNA, 23 nt, artificial
  siRNA Oligomer
uucaggaacaacauaaucccagu

SEQ ID NO: 5580 - RNA, 23 nt, artificial
  siRNA Oligomer
auacuucaauucccagaaaagcc

SEQ ID NO: 5581 - RNA, 23 nt, artificial
  siRNA Oligomer
uacuucaauucccagaaaagccc

SEQ ID NO: 5582 - RNA, 23 nt, artificial
  siRNA Oligomer
acuucaauucccagaaaagccca

SEQ ID NO: 5583 - RNA, 23 nt, artificial
  siRNA Oligomer
cuucaauucccagaaaagcccag

SEQ ID NO: 5584 - RNA, 23 nt, artificial
  siRNA Oligomer
uucaauucccagaaaagcccaga

SEQ ID NO: 5585 - RNA, 23 nt, artificial
  siRNA Oligomer
uacuuuugcuuaccuauuccauc

SEQ ID NO: 5586 - RNA, 23 nt, artificial
  siRNA Oligomer
acuuuugcuuaccuauuccaucc

SEQ ID NO: 5587 - RNA, 23 nt, artificial
  siRNA Oligomer
cuuuugcuuaccuauuccauccc

SEQ ID NO: 5588 - RNA, 23 nt, artificial
  siRNA Oligomer
uuuugcuuaccuauuccauccca

SEQ ID NO: 5589 - RNA, 23 nt, artificial
  siRNA Oligomer
uuugcuuaccuauuccaucccau

SEQ ID NO: 5590 - RNA, 23 nt, artificial
  siRNA Oligomer
cauuuucaauuuccaaguucacg

SEQ ID NO: 5591 - RNA, 23 nt, artificial
  siRNA Oligomer
auuuucaauuuccaaguucacgu

SEQ ID NO: 5592 - RNA, 23 nt, artificial
  siRNA Oligomer
uuuucaauuuccaaguucacgug

SEQ ID NO: 5593 - RNA, 23 nt, artificial
  siRNA Oligomer
uuucaauuuccaaguucacgugc

SEQ ID NO: 5594 - RNA, 23 nt, artificial
  siRNA Oligomer
uucaauuuccaaguucacgugca

SEQ ID NO: 5595 - RNA, 23 nt, artificial
  siRNA Oligomer
uugcuuaccuauuccaucccauu

SEQ ID NO: 5596 - RNA, 23 nt, artificial
  siRNA Oligomer
aguuuguuagaacacuggcuaau

SEQ ID NO: 5597 - RNA, 23 nt, artificial
  siRNA Oligomer
guuuguuagaacacuggcuaauu

SEQ ID NO: 5598 - RNA, 23 nt, artificial
  siRNA Oligomer
uuuguuagaacacuggcuaauuu

SEQ ID NO: 5599 - RNA, 23 nt, artificial
  siRNA Oligomer
ucccuuuuuaggacccuucaauc

SEQ ID NO: 5600 - RNA, 23 nt, artificial
  siRNA Oligomer
cccuuuuuaggacccuucaauca

SEQ ID NO: 5601 - RNA, 23 nt, artificial
  siRNA Oligomer
ccuuuuuaggacccuucaaucac

SEQ ID NO: 5602 - RNA, 23 nt, artificial
  siRNA Oligomer
cuuuuuaggacccuucaaucacu

SEQ ID NO: 5603 - RNA, 23 nt, artificial
  siRNA Oligomer
uuuuuaggacccuucaaucacug

SEQ ID NO: 5604 - RNA, 23 nt, artificial
  siRNA Oligomer
auccucacagguauucaucauuc

SEQ ID NO: 5605 - RNA, 23 nt, artificial
  siRNA Oligomer
uccucacagguauucaucauuca

SEQ ID NO: 5606 - RNA, 23 nt, artificial
  siRNA Oligomer
ccucacagguauucaucauucac

SEQ ID NO: 5607 - RNA, 23 nt, artificial
  siRNA Oligomer
cucacagguauucaucauucacu

SEQ ID NO: 5608 - RNA, 23 nt, artificial
  siRNA Oligomer
ucacagguauucaucauucacuc

SEQ ID NO: 5609 - RNA, 23 nt, artificial
  siRNA Oligomer
aaaaucacuuagcaggcucucug

SEQ ID NO: 5610 - RNA, 23 nt, artificial
  siRNA Oligomer
aaaucacuuagcaggcucucugg

SEQ ID NO: 5611 - RNA, 23 nt, artificial
  siRNA Oligomer
aaucacuuagcaggcucucuggg

SEQ ID NO: 5612 - RNA, 23 nt, artificial
  siRNA Oligomer
aucacuuagcaggcucucugggu

SEQ ID NO: 5613 - RNA, 23 nt, artificial
  siRNA Oligomer
ucacuuagcaggcucucugggug

SEQ ID NO: 5614 - RNA, 23 nt, artificial
  siRNA Oligomer
uugauuuaucuuggcccaauucu

SEQ ID NO: 5615 - RNA, 23 nt, artificial
  siRNA Oligomer
ugauuuaucuuggcccaauucua

SEQ ID NO: 5616 - RNA, 23 nt, artificial
  siRNA Oligomer
gauuuaucuuggcccaauucuau

SEQ ID NO: 5617 - RNA, 23 nt, artificial
  siRNA Oligomer
auuuaucuuggcccaauucuaua

SEQ ID NO: 5618 - RNA, 23 nt, artificial
  siRNA Oligomer
uuuaucuuggcccaauucuauaa

SEQ ID NO: 5619 - RNA, 23 nt, artificial
  siRNA Oligomer
cuccuuauccacgacccacagca

SEQ ID NO: 5620 - RNA, 23 nt, artificial
  siRNA Oligomer
uccuuauccacgacccacagcaa

SEQ ID NO: 5621 - RNA, 23 nt, artificial
  siRNA Oligomer
ccuuauccacgacccacagcaag

SEQ ID NO: 5622 - RNA, 23 nt, artificial
  siRNA Oligomer
cuuauccacgacccacagcaagg

SEQ ID NO: 5623 - RNA, 23 nt, artificial
  siRNA Oligomer
uuauccacgacccacagcaagga

SEQ ID NO: 5624 - RNA, 23 nt, artificial
  siRNA Oligomer
auauuucucauuuacucuuaccu

SEQ ID NO: 5625 - RNA, 23 nt, artificial
  siRNA Oligomer
uauuucucauuuacucuuaccua

SEQ ID NO: 5626 - RNA, 23 nt, artificial
  siRNA Oligomer
auuucucauuuacucuuaccuag

SEQ ID NO: 5627 - RNA, 23 nt, artificial
  siRNA Oligomer
uuucucauuuacucuuaccuagg

SEQ ID NO: 5628 - RNA, 23 nt, artificial
  siRNA Oligomer
uucucauuuacucuuaccuaggg

SEQ ID NO: 5629 - RNA, 23 nt, artificial
  siRNA Oligomer
uuaguuugcuuugauuuggacag

SEQ ID NO: 5630 - RNA, 23 nt, artificial
  siRNA Oligomer
uaguuugcuuugauuuggacaga

SEQ ID NO: 5631 - RNA, 23 nt, artificial
  siRNA Oligomer
aguuugcuuugauuuggacagac

SEQ ID NO: 5632 - RNA, 23 nt, artificial
  siRNA Oligomer
guuugcuuugauuuggacagaca

SEQ ID NO: 5633 - RNA, 23 nt, artificial
  siRNA Oligomer
uuugcuuugauuuggacagacag

SEQ ID NO: 5634 - RNA, 23 nt, artificial
  siRNA Oligomer
auaguuuuacuacccaaucauga

SEQ ID NO: 5635 - RNA, 23 nt, artificial
  siRNA Oligomer
uaguuuuacuacccaaucaugaa

SEQ ID NO: 5636 - RNA, 23 nt, artificial
  siRNA Oligomer
aguuuuacuacccaaucaugaaa

SEQ ID NO: 5637 - RNA, 23 nt, artificial
  siRNA Oligomer
guuuuacuacccaaucaugaaau

SEQ ID NO: 5638 - RNA, 23 nt, artificial
  siRNA Oligomer
uuuuacuacccaaucaugaaaua

SEQ ID NO: 5639 - RNA, 23 nt, artificial
  siRNA Oligomer
uuuuaggacccuucaaucacugu

SEQ ID NO: 5640 - RNA, 23 nt, artificial
  siRNA Oligomer
uuuaggacccuucaaucacuguu

SEQ ID NO: 5641 - RNA, 23 nt, artificial
  siRNA Oligomer
gaauauuaauuuaacagccuucc

SEQ ID NO: 5642 - RNA, 23 nt, artificial
  siRNA Oligomer
aauauuaauuuaacagccuucca

SEQ ID NO: 5643 - RNA, 23 nt, artificial
  siRNA Oligomer
auauuaauuuaacagccuuccau

SEQ ID NO: 5644 - RNA, 23 nt, artificial
  siRNA Oligomer
uauuaauuuaacagccuuccaua

SEQ ID NO: 5645 - RNA, 23 nt, artificial
  siRNA Oligomer
auuaauuuaacagccuuccauaa

SEQ ID NO: 5646 - RNA, 23 nt, artificial
  siRNA Oligomer
guaguauacagcuacuacccuug

SEQ ID NO: 5647 - RNA, 23 nt, artificial
  siRNA Oligomer
uaguauacagcuacuacccuuga

SEQ ID NO: 5648 - RNA, 23 nt, artificial
  siRNA Oligomer
aguauacagcuacuacccuugac

SEQ ID NO: 5649 - RNA, 23 nt, artificial
  siRNA Oligomer
guauacagcuacuacccuugaca

SEQ ID NO: 5650 - RNA, 23 nt, artificial
  siRNA Oligomer
uauacagcuacuacccuugacaa

SEQ ID NO: 5651 - RNA, 23 nt, artificial
  siRNA Oligomer
aaguuuaguuugcuuugauuugg

SEQ ID NO: 5652 - RNA, 23 nt, artificial
  siRNA Oligomer
aguuuaguuugcuuugauuugga

SEQ ID NO: 5653 - RNA, 23 nt, artificial
  siRNA Oligomer
guuuaguuugcuuugauuuggac

SEQ ID NO: 5654 - RNA, 23 nt, artificial
  siRNA Oligomer
uuuaguuugcuuugauuuggaca

SEQ ID NO: 5655 - RNA, 23 nt, artificial
  siRNA Oligomer
uaauuuaacagccuuccauaagc

SEQ ID NO: 5656 - RNA, 23 nt, artificial
  siRNA Oligomer
aauuuaacagccuuccauaagcc

SEQ ID NO: 5657 - RNA, 23 nt, artificial
  siRNA Oligomer
auuuaacagccuuccauaagcca

SEQ ID NO: 5658 - RNA, 23 nt, artificial
  siRNA Oligomer
uuuaacagccuuccauaagccau

SEQ ID NO: 5659 - RNA, 23 nt, artificial
  siRNA Oligomer
uuaacagccuuccauaagccauc

SEQ ID NO: 5660 - RNA, 23 nt, artificial
  siRNA Oligomer
cacuuauaguaucaguaacagga

SEQ ID NO: 5661 - RNA, 23 nt, artificial
  siRNA Oligomer
acuuauaguaucaguaacaggau

SEQ ID NO: 5662 - RNA, 23 nt, artificial
  siRNA Oligomer
cuuauaguaucaguaacaggauc

SEQ ID NO: 5663 - RNA, 23 nt, artificial
  siRNA Oligomer
uuauaguaucaguaacaggauca

SEQ ID NO: 5664 - RNA, 23 nt, artificial
  siRNA Oligomer
uauaguaucaguaacaggaucac

SEQ ID NO: 5665 - RNA, 23 nt, artificial
  siRNA Oligomer
ucaguuucucagggacaaggacc

SEQ ID NO: 5666 - RNA, 23 nt, artificial
  siRNA Oligomer
caguuucucagggacaaggaccu

SEQ ID NO: 5667 - RNA, 23 nt, artificial
  siRNA Oligomer
aguuucucagggacaaggaccuu

SEQ ID NO: 5668 - RNA, 23 nt, artificial
  siRNA Oligomer
guuucucagggacaaggaccuuu

SEQ ID NO: 5669 - RNA, 23 nt, artificial
  siRNA Oligomer
uuucucagggacaaggaccuuug

SEQ ID NO: 5670 - RNA, 23 nt, artificial
  siRNA Oligomer
gagauaaugaucuacuuaguugg

SEQ ID NO: 5671 - RNA, 23 nt, artificial
  siRNA Oligomer
agauaaugaucuacuuaguugga

SEQ ID NO: 5672 - RNA, 23 nt, artificial
  siRNA Oligomer
gauaaugaucuacuuaguuggaa

SEQ ID NO: 5673 - RNA, 23 nt, artificial
  siRNA Oligomer
auaaugaucuacuuaguuggaau

SEQ ID NO: 5674 - RNA, 23 nt, artificial
  siRNA Oligomer
uaaugaucuacuuaguuggaaua

SEQ ID NO: 5675 - RNA, 23 nt, artificial
  siRNA Oligomer
acaguucuccagcauuuuaacca

SEQ ID NO: 5676 - RNA, 23 nt, artificial
  siRNA Oligomer
caguucuccagcauuuuaaccaa

SEQ ID NO: 5677 - RNA, 23 nt, artificial
  siRNA Oligomer
aguucuccagcauuuuaaccaaa

SEQ ID NO: 5678 - RNA, 23 nt, artificial
  siRNA Oligomer
guucuccagcauuuuaaccaaau

SEQ ID NO: 5679 - RNA, 23 nt, artificial
  siRNA Oligomer
uucuccagcauuuuaaccaaauu

SEQ ID NO: 5680 - RNA, 23 nt, artificial
  siRNA Oligomer
gguauucaucauucacucaaugg

SEQ ID NO: 5681 - RNA, 23 nt, artificial
  siRNA Oligomer
guauucaucauucacucaaugga

SEQ ID NO: 5682 - RNA, 23 nt, artificial
  siRNA Oligomer
uauucaucauucacucaauggaa

SEQ ID NO: 5683 - RNA, 23 nt, artificial
  siRNA Oligomer
auucaucauucacucaauggaag

SEQ ID NO: 5684 - RNA, 23 nt, artificial
  siRNA Oligomer
uucaucauucacucaauggaaga

SEQ ID NO: 5685 - RNA, 23 nt, artificial
  siRNA Oligomer
auuguugaguggaggcuaaauuc

SEQ ID NO: 5686 - RNA, 23 nt, artificial
  siRNA Oligomer
uuguugaguggaggcuaaauucu

SEQ ID NO: 5687 - RNA, 23 nt, artificial
  siRNA Oligomer
uguugaguggaggcuaaauucuc

SEQ ID NO: 5688 - RNA, 23 nt, artificial
  siRNA Oligomer
guugaguggaggcuaaauucucu

SEQ ID NO: 5689 - RNA, 23 nt, artificial
  siRNA Oligomer
uugaguggaggcuaaauucucuc

SEQ ID NO: 5690 - RNA, 23 nt, artificial
  siRNA Oligomer
uuucuuaacaagucgaaauccug

SEQ ID NO: 5691 - RNA, 23 nt, artificial
  siRNA Oligomer
uucuuaacaagucgaaauccuga

SEQ ID NO: 5692 - RNA, 23 nt, artificial
  siRNA Oligomer
ucuuaacaagucgaaauccugag

SEQ ID NO: 5693 - RNA, 23 nt, artificial
  siRNA Oligomer
cuuaacaagucgaaauccugagc

SEQ ID NO: 5694 - RNA, 23 nt, artificial
  siRNA Oligomer
uuaacaagucgaaauccugagcu

SEQ ID NO: 5695 - RNA, 23 nt, artificial
  siRNA Oligomer
ucaauuuccaaguucacgugcau

SEQ ID NO: 5696 - RNA, 23 nt, artificial
  siRNA Oligomer
uaguaucaguaacaggaucacac

SEQ ID NO: 5697 - RNA, 23 nt, artificial
  siRNA Oligomer
aguaucaguaacaggaucacacc

SEQ ID NO: 5698 - RNA, 23 nt, artificial
  siRNA Oligomer
guaucaguaacaggaucacaccu

SEQ ID NO: 5699 - RNA, 23 nt, artificial
  siRNA Oligomer
uaucaguaacaggaucacaccug

SEQ ID NO: 5700 - RNA, 23 nt, artificial
  siRNA Oligomer
aucaguaacaggaucacaccugu

SEQ ID NO: 5701 - RNA, 23 nt, artificial
  siRNA Oligomer
gagauuaagcacauguaauacug

SEQ ID NO: 5702 - RNA, 23 nt, artificial
  siRNA Oligomer
agauuaagcacauguaauacuga

SEQ ID NO: 5703 - RNA, 23 nt, artificial
  siRNA Oligomer
gauuaagcacauguaauacugaa

SEQ ID NO: 5704 - RNA, 23 nt, artificial
  siRNA Oligomer
auuaagcacauguaauacugaaa

SEQ ID NO: 5705 - RNA, 23 nt, artificial
  siRNA Oligomer
uuaagcacauguaauacugaaaa

SEQ ID NO: 5706 - RNA, 23 nt, artificial
  siRNA Oligomer
gguuucuuauuuagggcaggugg

SEQ ID NO: 5707 - RNA, 23 nt, artificial
  siRNA Oligomer
guuucuuauuuagggcagguggg

SEQ ID NO: 5708 - RNA, 23 nt, artificial
  siRNA Oligomer
uuucuuauuuagggcaggugggg

SEQ ID NO: 5709 - RNA, 23 nt, artificial
  siRNA Oligomer
uucuuauuuagggcagguggggc

SEQ ID NO: 5710 - RNA, 23 nt, artificial
  siRNA Oligomer
ucuuauuuagggcagguggggca

SEQ ID NO: 5711 - RNA, 23 nt, artificial
  siRNA Oligomer
aauauuucucauuuacucuuacc

SEQ ID NO: 5712 - RNA, 23 nt, artificial
  siRNA Oligomer
uugauuuggacagacaguucucc

SEQ ID NO: 5713 - RNA, 23 nt, artificial
  siRNA Oligomer
ugauuuggacagacaguucucca

SEQ ID NO: 5714 - RNA, 23 nt, artificial
  siRNA Oligomer
gauuuggacagacaguucuccag

SEQ ID NO: 5715 - RNA, 23 nt, artificial
  siRNA Oligomer
auuuggacagacaguucuccagc

SEQ ID NO: 5716 - RNA, 23 nt, artificial
  siRNA Oligomer
uuuggacagacaguucuccagca

SEQ ID NO: 5717 - RNA, 23 nt, artificial
  siRNA Oligomer
uugauuccucaaauauuaccucg

SEQ ID NO: 5718 - RNA, 23 nt, artificial
  siRNA Oligomer
ugauuccucaaauauuaccucgu

SEQ ID NO: 5719 - RNA, 23 nt, artificial
  siRNA Oligomer
gauuccucaaauauuaccucguu

SEQ ID NO: 5720 - RNA, 23 nt, artificial
  siRNA Oligomer
auuccucaaauauuaccucguug

SEQ ID NO: 5721 - RNA, 23 nt, artificial
  siRNA Oligomer
uuccucaaauauuaccucguuga

SEQ ID NO: 5722 - RNA, 23 nt, artificial
  siRNA Oligomer
ggcuuuguaguaucuuuccaagc

SEQ ID NO: 5723 - RNA, 23 nt, artificial
  siRNA Oligomer
gcuuuguaguaucuuuccaagca

SEQ ID NO: 5724 - RNA, 23 nt, artificial
  siRNA Oligomer
cuuuguaguaucuuuccaagcau

SEQ ID NO: 5725 - RNA, 23 nt, artificial
  siRNA Oligomer
uuuguaguaucuuuccaagcauu

SEQ ID NO: 5726 - RNA, 23 nt, artificial
  siRNA Oligomer
uuguaguaucuuuccaagcauuu

SEQ ID NO: 5727 - RNA, 23 nt, artificial
  siRNA Oligomer
uaauuugaacagugacauuuuag

SEQ ID NO: 5728 - RNA, 23 nt, artificial
  siRNA Oligomer
aauuugaacagugacauuuuagg

SEQ ID NO: 5729 - RNA, 23 nt, artificial
  siRNA Oligomer
auuugaacagugacauuuuaggu

SEQ ID NO: 5730 - RNA, 23 nt, artificial
  siRNA Oligomer
uuugaacagugacauuuuagguc

SEQ ID NO: 5731 - RNA, 23 nt, artificial
  siRNA Oligomer
uugaacagugacauuuuagguca

SEQ ID NO: 5732 - RNA, 23 nt, artificial
  siRNA Oligomer
aaacauuagagugaggaagucac

SEQ ID NO: 5733 - RNA, 23 nt, artificial
  siRNA Oligomer
aacauuagagugaggaagucacc

SEQ ID NO: 5734 - RNA, 23 nt, artificial
  siRNA Oligomer
acauuagagugaggaagucacca

SEQ ID NO: 5735 - RNA, 23 nt, artificial
  siRNA Oligomer
cauuagagugaggaagucaccaa

SEQ ID NO: 5736 - RNA, 23 nt, artificial
  siRNA Oligomer
auuagagugaggaagucaccaag

SEQ ID NO: 5737 - RNA, 23 nt, artificial
  siRNA Oligomer
ugcuuaccuauuccaucccauuc

SEQ ID NO: 5738 - RNA, 23 nt, artificial
  siRNA Oligomer
gcuuaccuauuccaucccauuca

SEQ ID NO: 5739 - RNA, 23 nt, artificial
  siRNA Oligomer
cuuaccuauuccaucccauucaa

SEQ ID NO: 5740 - RNA, 23 nt, artificial
  siRNA Oligomer
uuaccuauuccaucccauucaau

SEQ ID NO: 5741 - RNA, 23 nt, artificial
  siRNA Oligomer
uaccuauuccaucccauucaauu

SEQ ID NO: 5742 - RNA, 23 nt, artificial
  siRNA Oligomer
accauuuuguaagcauaacaggc

SEQ ID NO: 5743 - RNA, 23 nt, artificial
  siRNA Oligomer
ccauuuuguaagcauaacaggca

SEQ ID NO: 5744 - RNA, 23 nt, artificial
  siRNA Oligomer
cauuuuguaagcauaacaggcaa

SEQ ID NO: 5745 - RNA, 23 nt, artificial
  siRNA Oligomer
auuuuguaagcauaacaggcaag

SEQ ID NO: 5746 - RNA, 23 nt, artificial
  siRNA Oligomer
uuuuguaagcauaacaggcaaga

SEQ ID NO: 5747 - RNA, 23 nt, artificial
  siRNA Oligomer
auagucuauuaccaagccuaccu

SEQ ID NO: 5748 - RNA, 23 nt, artificial
  siRNA Oligomer
uagucuauuaccaagccuaccug

SEQ ID NO: 5749 - RNA, 23 nt, artificial
  siRNA Oligomer
agucuauuaccaagccuaccuga

SEQ ID NO: 5750 - RNA, 23 nt, artificial
  siRNA Oligomer
gucuauuaccaagccuaccugaa

SEQ ID NO: 5751 - RNA, 23 nt, artificial
  siRNA Oligomer
ucuauuaccaagccuaccugaaa

SEQ ID NO: 5752 - RNA, 23 nt, artificial
  siRNA Oligomer
uccuauccucacagguauucauc

SEQ ID NO: 5753 - RNA, 23 nt, artificial
  siRNA Oligomer
ccuauccucacagguauucauca

SEQ ID NO: 5754 - RNA, 23 nt, artificial
  siRNA Oligomer
cuauccucacagguauucaucau

SEQ ID NO: 5755 - RNA, 23 nt, artificial
  siRNA Oligomer
uauccucacagguauucaucauu

SEQ ID NO: 5756 - RNA, 23 nt, artificial
  siRNA Oligomer
ccuuuauuauucccuagugacag

SEQ ID NO: 5757 - RNA, 23 nt, artificial
  siRNA Oligomer
cuuuauuauucccuagugacagg

SEQ ID NO: 5758 - RNA, 23 nt, artificial
  siRNA Oligomer
uuuauuauucccuagugacaggu

SEQ ID NO: 5759 - RNA, 23 nt, artificial
  siRNA Oligomer
uuauuauucccuagugacaggua

SEQ ID NO: 5760 - RNA, 23 nt, artificial
  siRNA Oligomer
uauuauucccuagugacagguau

SEQ ID NO: 5761 - RNA, 23 nt, artificial
  siRNA Oligomer
agcuuuuguugccucuuuaaaac

SEQ ID NO: 5762 - RNA, 23 nt, artificial
  siRNA Oligomer
gcuuuuguugccucuuuaaaaca

SEQ ID NO: 5763 - RNA, 23 nt, artificial
  siRNA Oligomer
cuuuuguugccucuuuaaaacau

SEQ ID NO: 5764 - RNA, 23 nt, artificial
  siRNA Oligomer
uuuuguugccucuuuaaaacauu

SEQ ID NO: 5765 - RNA, 23 nt, artificial
  siRNA Oligomer
uuuguugccucuuuaaaacauua

SEQ ID NO: 5766 - RNA, 23 nt, artificial
  siRNA Oligomer
aagaguuuaguuuguuagaacac

SEQ ID NO: 5767 - RNA, 23 nt, artificial
  siRNA Oligomer
agaguuuaguuuguuagaacacu

SEQ ID NO: 5768 - RNA, 23 nt, artificial
  siRNA Oligomer
guuuauauagucuauuaccaagc

SEQ ID NO: 5769 - RNA, 23 nt, artificial
  siRNA Oligomer
uuuauauagucuauuaccaagcc

SEQ ID NO: 5770 - RNA, 23 nt, artificial
  siRNA Oligomer
uuauauagucuauuaccaagccu

SEQ ID NO: 5771 - RNA, 23 nt, artificial
  siRNA Oligomer
uauauagucuauuaccaagccua

SEQ ID NO: 5772 - RNA, 23 nt, artificial
  siRNA Oligomer
auauagucuauuaccaagccuac

SEQ ID NO: 5773 - RNA, 23 nt, artificial
  siRNA Oligomer
uguuuuucaguaacaccaggaug

SEQ ID NO: 5774 - RNA, 23 nt, artificial
  siRNA Oligomer
guuuuucaguaacaccaggauga

SEQ ID NO: 5775 - RNA, 23 nt, artificial
  siRNA Oligomer
uuuuucaguaacaccaggaugaa

SEQ ID NO: 5776 - RNA, 23 nt, artificial
  siRNA Oligomer
uuuucaguaacaccaggaugaau

SEQ ID NO: 5777 - RNA, 23 nt, artificial
  siRNA Oligomer
uuucaguaacaccaggaugaaua

SEQ ID NO: 5778 - RNA, 23 nt, artificial
  siRNA Oligomer
ggcuuuuggaaguuuugauaggc

SEQ ID NO: 5779 - RNA, 23 nt, artificial
  siRNA Oligomer
gcuuuuggaaguuuugauaggcu

SEQ ID NO: 5780 - RNA, 23 nt, artificial
  siRNA Oligomer
cuuuuggaaguuuugauaggcua

SEQ ID NO: 5781 - RNA, 23 nt, artificial
  siRNA Oligomer
uuuuggaaguuuugauaggcuaa

SEQ ID NO: 5782 - RNA, 23 nt, artificial
  siRNA Oligomer
uuuggaaguuuugauaggcuaaa

SEQ ID NO: 5783 - RNA, 23 nt, artificial
  siRNA Oligomer
ccuguuuuucaguaacaccagga

SEQ ID NO: 5784 - RNA, 23 nt, artificial
  siRNA Oligomer
cuguuuuucaguaacaccaggau

SEQ ID NO: 5785 - RNA, 23 nt, artificial
  siRNA Oligomer
aggcaucuaaaacaacaccgugg

SEQ ID NO: 5786 - RNA, 23 nt, artificial
  siRNA Oligomer
ggcaucuaaaacaacaccguggu

SEQ ID NO: 5787 - RNA, 23 nt, artificial
  siRNA Oligomer
gcaucuaaaacaacaccgugguu

SEQ ID NO: 5788 - RNA, 23 nt, artificial
  siRNA Oligomer
caucuaaaacaacaccgugguua

SEQ ID NO: 5789 - RNA, 23 nt, artificial
  siRNA Oligomer
aucuaaaacaacaccgugguuac

SEQ ID NO: 5790 - RNA, 23 nt, artificial
  siRNA Oligomer
uccauaagccaucaccauuuugu

SEQ ID NO: 5791 - RNA, 23 nt, artificial
  siRNA Oligomer
ccauaagccaucaccauuuugua

SEQ ID NO: 5792 - RNA, 23 nt, artificial
  siRNA Oligomer
cauaagccaucaccauuuuguaa

SEQ ID NO: 5793 - RNA, 23 nt, artificial
  siRNA Oligomer
auaagccaucaccauuuuguaag

SEQ ID NO: 5794 - RNA, 23 nt, artificial
  siRNA Oligomer
uaagccaucaccauuuuguaagc

SEQ ID NO: 5795 - RNA, 23 nt, artificial
  siRNA Oligomer
cggguucuugcugcucaaacugc

SEQ ID NO: 5796 - RNA, 23 nt, artificial
  siRNA Oligomer
ggguucuugcugcucaaacugcc

SEQ ID NO: 5797 - RNA, 23 nt, artificial
  siRNA Oligomer
gguucuugcugcucaaacugcca

SEQ ID NO: 5798 - RNA, 23 nt, artificial
  siRNA Oligomer
guucuugcugcucaaacugccag

SEQ ID NO: 5799 - RNA, 23 nt, artificial
  siRNA Oligomer
uucuugcugcucaaacugccagu

SEQ ID NO: 5800 - RNA, 23 nt, artificial
  siRNA Oligomer
uggcuuuguaguaucuuuccaag

SEQ ID NO: 5801 - RNA, 23 nt, artificial
  siRNA Oligomer
uagguacgacgcuagaaucacac

SEQ ID NO: 5802 - RNA, 23 nt, artificial
  siRNA Oligomer
agguacgacgcuagaaucacaca

SEQ ID NO: 5803 - RNA, 23 nt, artificial
  siRNA Oligomer
gguacgacgcuagaaucacacac

SEQ ID NO: 5804 - RNA, 23 nt, artificial
  siRNA Oligomer
guacgacgcuagaaucacacaca

SEQ ID NO: 5805 - RNA, 23 nt, artificial
  siRNA Oligomer
uacgacgcuagaaucacacacaa

SEQ ID NO: 5806 - RNA, 23 nt, artificial
  siRNA Oligomer
acaguucuacaucgaugcccaag

SEQ ID NO: 5807 - RNA, 23 nt, artificial
  siRNA Oligomer
caguucuacaucgaugcccaaga

SEQ ID NO: 5808 - RNA, 23 nt, artificial
  siRNA Oligomer
aguucuacaucgaugcccaagaa

SEQ ID NO: 5809 - RNA, 23 nt, artificial
  siRNA Oligomer
guucuacaucgaugcccaagaag

SEQ ID NO: 5810 - RNA, 23 nt, artificial
  siRNA Oligomer
uucuacaucgaugcccaagaagc

SEQ ID NO: 5811 - RNA, 23 nt, artificial
  siRNA Oligomer
ucaauucccagaaaagcccagag

SEQ ID NO: 5812 - RNA, 23 nt, artificial
  siRNA Oligomer
ugcuuugauuuggacagacaguu

SEQ ID NO: 5813 - RNA, 23 nt, artificial
  siRNA Oligomer
gcuuugauuuggacagacaguuc

SEQ ID NO: 5814 - RNA, 23 nt, artificial
  siRNA Oligomer
cuuugauuuggacagacaguucu

SEQ ID NO: 5815 - RNA, 23 nt, artificial
  siRNA Oligomer
uuugauuuggacagacaguucuc

SEQ ID NO: 5816 - RNA, 23 nt, artificial
  siRNA Oligomer
auuuucccuuuuuaggacccuuc

SEQ ID NO: 5817 - RNA, 23 nt, artificial
  siRNA Oligomer
uuuucccuuuuuaggacccuuca

SEQ ID NO: 5818 - RNA, 23 nt, artificial
  siRNA Oligomer
uuucccuuuuuaggacccuucaa

SEQ ID NO: 5819 - RNA, 23 nt, artificial
  siRNA Oligomer
uucccuuuuuaggacccuucaau

SEQ ID NO: 5820 - RNA, 23 nt, artificial
  siRNA Oligomer
acucuuaccuaggguuaagcuuu

SEQ ID NO: 5821 - RNA, 23 nt, artificial
  siRNA Oligomer
cucuuaccuaggguuaagcuuua

SEQ ID NO: 5822 - RNA, 23 nt, artificial
  siRNA Oligomer
ucuuaccuaggguuaagcuuuaa

SEQ ID NO: 5823 - RNA, 23 nt, artificial
  siRNA Oligomer
cuuaccuaggguuaagcuuuaau

SEQ ID NO: 5824 - RNA, 23 nt, artificial
  siRNA Oligomer
uuaccuaggguuaagcuuuaauu

SEQ ID NO: 5825 - RNA, 23 nt, artificial
  siRNA Oligomer
uucaucugagauuaagcacaugu

SEQ ID NO: 5826 - RNA, 23 nt, artificial
  siRNA Oligomer
ucaucugagauuaagcacaugua

SEQ ID NO: 5827 - RNA, 23 nt, artificial
  siRNA Oligomer
caucugagauuaagcacauguaa

SEQ ID NO: 5828 - RNA, 23 nt, artificial
  siRNA Oligomer
aucugagauuaagcacauguaau

SEQ ID NO: 5829 - RNA, 23 nt, artificial
  siRNA Oligomer
ucugagauuaagcacauguaaua

SEQ ID NO: 5830 - RNA, 23 nt, artificial
  siRNA Oligomer
accaaauucuggcaaguugauuc

SEQ ID NO: 5831 - RNA, 23 nt, artificial
  siRNA Oligomer
ccaaauucuggcaaguugauucc

SEQ ID NO: 5832 - RNA, 23 nt, artificial
  siRNA Oligomer
caaauucuggcaaguugauuccu

SEQ ID NO: 5833 - RNA, 23 nt, artificial
  siRNA Oligomer
aaauucuggcaaguugauuccuc

SEQ ID NO: 5834 - RNA, 23 nt, artificial
  siRNA Oligomer
aauucuggcaaguugauuccuca

SEQ ID NO: 5835 - RNA, 23 nt, artificial
  siRNA Oligomer
ucuuuaaaacauuagagugagga

SEQ ID NO: 5836 - RNA, 23 nt, artificial
  siRNA Oligomer
cuuuaaaacauuagagugaggaa

SEQ ID NO: 5837 - RNA, 23 nt, artificial
  siRNA Oligomer
uuuaaaacauuagagugaggaag

SEQ ID NO: 5838 - RNA, 23 nt, artificial
  siRNA Oligomer
uuaaaacauuagagugaggaagu

SEQ ID NO: 5839 - RNA, 23 nt, artificial
  siRNA Oligomer
uaaaacauuagagugaggaaguc

SEQ ID NO: 5840 - RNA, 23 nt, artificial
  siRNA Oligomer
agauuggcuuuguaguaucuuuc

SEQ ID NO: 5841 - RNA, 23 nt, artificial
  siRNA Oligomer
gauuggcuuuguaguaucuuucc

SEQ ID NO: 5842 - RNA, 23 nt, artificial
  siRNA Oligomer
auuggcuuuguaguaucuuucca

SEQ ID NO: 5843 - RNA, 23 nt, artificial
  siRNA Oligomer
uuggcuuuguaguaucuuuccaa

SEQ ID NO: 5844 - RNA, 23 nt, artificial
  siRNA Oligomer
uaccuuccugucuaaaaacccuu

SEQ ID NO: 5845 - RNA, 23 nt, artificial
  siRNA Oligomer
accuuccugucuaaaaacccuuc

SEQ ID NO: 5846 - RNA, 23 nt, artificial
  siRNA Oligomer
ccuuccugucuaaaaacccuuca

SEQ ID NO: 5847 - RNA, 23 nt, artificial
  siRNA Oligomer
cuuccugucuaaaaacccuucaa

SEQ ID NO: 5848 - RNA, 23 nt, artificial
  siRNA Oligomer
uuccugucuaaaaacccuucaaa

SEQ ID NO: 5849 - RNA, 23 nt, artificial
  siRNA Oligomer
uucaguaacaccaggaugaauac

SEQ ID NO: 5850 - RNA, 23 nt, artificial
  siRNA Oligomer
ucacuuauaguaucaguaacagg

SEQ ID NO: 5851 - RNA, 23 nt, artificial
  siRNA Oligomer
gcuguacuauaaaccauaucucc

SEQ ID NO: 5852 - RNA, 23 nt, artificial
  siRNA Oligomer
cuguacuauaaaccauaucucca

SEQ ID NO: 5853 - RNA, 23 nt, artificial
  siRNA Oligomer
uguacuauaaaccauaucuccau

SEQ ID NO: 5854 - RNA, 23 nt, artificial
  siRNA Oligomer
guacuauaaaccauaucuccaua

SEQ ID NO: 5855 - RNA, 23 nt, artificial
  siRNA Oligomer
uacuauaaaccauaucuccauag

SEQ ID NO: 5856 - RNA, 23 nt, artificial
  siRNA Oligomer
ucuguacaaaaaugggaucuaug

SEQ ID NO: 5857 - RNA, 23 nt, artificial
  siRNA Oligomer
cuguacaaaaaugggaucuaugc

SEQ ID NO: 5858 - RNA, 23 nt, artificial
  siRNA Oligomer
uguacaaaaaugggaucuaugca

SEQ ID NO: 5859 - RNA, 23 nt, artificial
  siRNA Oligomer
guacaaaaaugggaucuaugcag

SEQ ID NO: 5860 - RNA, 23 nt, artificial
  siRNA Oligomer
uacaaaaaugggaucuaugcaga

SEQ ID NO: 5861 - RNA, 23 nt, artificial
  siRNA Oligomer
accuauuccaucccauucaauuc

SEQ ID NO: 5862 - RNA, 23 nt, artificial
  siRNA Oligomer
ccuauuccaucccauucaauucu

SEQ ID NO: 5863 - RNA, 23 nt, artificial
  siRNA Oligomer
cuauuccaucccauucaauucug

SEQ ID NO: 5864 - RNA, 23 nt, artificial
  siRNA Oligomer
uauuccaucccauucaauucugu

SEQ ID NO: 5865 - RNA, 23 nt, artificial
  siRNA Oligomer
gaacuaauuuccuauccucacag

SEQ ID NO: 5866 - RNA, 23 nt, artificial
  siRNA Oligomer
aacuaauuuccuauccucacagg

SEQ ID NO: 5867 - RNA, 23 nt, artificial
  siRNA Oligomer
acuaauuuccuauccucacaggu

SEQ ID NO: 5868 - RNA, 23 nt, artificial
  siRNA Oligomer
cuaauuuccuauccucacaggua

SEQ ID NO: 5869 - RNA, 23 nt, artificial
  siRNA Oligomer
uaauuuccuauccucacagguau

SEQ ID NO: 5870 - RNA, 23 nt, artificial
  siRNA Oligomer
ucucauuuacucuuaccuagggu

SEQ ID NO: 5871 - RNA, 23 nt, artificial
  siRNA Oligomer
cucauuuacucuuaccuaggguu

SEQ ID NO: 5872 - RNA, 23 nt, artificial
  siRNA Oligomer
ucauuuacucuuaccuaggguua

SEQ ID NO: 5873 - RNA, 23 nt, artificial
  siRNA Oligomer
guaguaucuuuccaagcauuuga

SEQ ID NO: 5874 - RNA, 23 nt, artificial
  siRNA Oligomer
uaguaucuuuccaagcauuugaa

SEQ ID NO: 5875 - RNA, 23 nt, artificial
  siRNA Oligomer
aguaucuuuccaagcauuugaag

SEQ ID NO: 5876 - RNA, 23 nt, artificial
  siRNA Oligomer
guaucuuuccaagcauuugaaga

SEQ ID NO: 5877 - RNA, 23 nt, artificial
  siRNA Oligomer
uaucuuuccaagcauuugaagag

SEQ ID NO: 5878 - RNA, 23 nt, artificial
  siRNA Oligomer
acacuauuuugaaucacuucucc

SEQ ID NO: 5879 - RNA, 23 nt, artificial
  siRNA Oligomer
cacuauuuugaaucacuucucca

SEQ ID NO: 5880 - RNA, 23 nt, artificial
  siRNA Oligomer
acuauuuugaaucacuucuccaa

SEQ ID NO: 5881 - RNA, 23 nt, artificial
  siRNA Oligomer
cuauuuugaaucacuucuccaaa

SEQ ID NO: 5882 - RNA, 23 nt, artificial
  siRNA Oligomer
uauuuugaaucacuucuccaaag

SEQ ID NO: 5883 - RNA, 23 nt, artificial
  siRNA Oligomer
ccugaauaagcuccuuauccacg

SEQ ID NO: 5884 - RNA, 23 nt, artificial
  siRNA Oligomer
cugaauaagcuccuuauccacga

SEQ ID NO: 5885 - RNA, 23 nt, artificial
  siRNA Oligomer
ugaauaagcuccuuauccacgac

SEQ ID NO: 5886 - RNA, 23 nt, artificial
  siRNA Oligomer
gaauaagcuccuuauccacgacc

SEQ ID NO: 5887 - RNA, 23 nt, artificial
  siRNA Oligomer
aauaagcuccuuauccacgaccc

SEQ ID NO: 5888 - RNA, 23 nt, artificial
  siRNA Oligomer
aaaaucaaaauaggcaaaucugg

SEQ ID NO: 5889 - RNA, 23 nt, artificial
  siRNA Oligomer
aaaucaaaauaggcaaaucuggu

SEQ ID NO: 5890 - RNA, 23 nt, artificial
  siRNA Oligomer
aaucaaaauaggcaaaucugguu

SEQ ID NO: 5891 - RNA, 23 nt, artificial
  siRNA Oligomer
aucaaaauaggcaaaucugguuu

SEQ ID NO: 5892 - RNA, 23 nt, artificial
  siRNA Oligomer
ucaaaauaggcaaaucugguuua

SEQ ID NO: 5893 - RNA, 23 nt, artificial
  siRNA Oligomer
auuuugaaucacuucuccaaagg

SEQ ID NO: 5894 - RNA, 23 nt, artificial
  siRNA Oligomer
uuuugaaucacuucuccaaaggc

SEQ ID NO: 5895 - RNA, 23 nt, artificial
  siRNA Oligomer
auucuggcaaguugauuccucaa

SEQ ID NO: 5896 - RNA, 23 nt, artificial
  siRNA Oligomer
uucuggcaaguugauuccucaaa

SEQ ID NO: 5897 - RNA, 23 nt, artificial
  siRNA Oligomer
ucuggcaaguugauuccucaaau

SEQ ID NO: 5898 - RNA, 23 nt, artificial
  siRNA Oligomer
ccauuauugccguaauauuucuc

SEQ ID NO: 5899 - RNA, 23 nt, artificial
  siRNA Oligomer
cauuauugccguaauauuucuca

SEQ ID NO: 5900 - RNA, 23 nt, artificial
  siRNA Oligomer
auuauugccguaauauuucucau

SEQ ID NO: 5901 - RNA, 23 nt, artificial
  siRNA Oligomer
uuauugccguaauauuucucauu

SEQ ID NO: 5902 - RNA, 23 nt, artificial
  siRNA Oligomer
uauugccguaauauuucucauuu

SEQ ID NO: 5903 - RNA, 23 nt, artificial
  siRNA Oligomer
auuccaucccauucaauucugua

SEQ ID NO: 5904 - RNA, 23 nt, artificial
  siRNA Oligomer
uuccaucccauucaauucuguac

SEQ ID NO: 5905 - RNA, 23 nt, artificial
  siRNA Oligomer
cuacuuuugcuuaccuauuccau

SEQ ID NO: 5906 - RNA, 23 nt, artificial
  siRNA Oligomer
cacaauccuauccagcuuuuuac

SEQ ID NO: 5907 - RNA, 23 nt, artificial
  siRNA Oligomer
acaauccuauccagcuuuuuaca

SEQ ID NO: 5908 - RNA, 23 nt, artificial
  siRNA Oligomer
caauccuauccagcuuuuuacau

SEQ ID NO: 5909 - RNA, 23 nt, artificial
  siRNA Oligomer
aauccuauccagcuuuuuacaua

SEQ ID NO: 5910 - RNA, 23 nt, artificial
  siRNA Oligomer
auccuauccagcuuuuuacauac

SEQ ID NO: 5911 - RNA, 23 nt, artificial
  siRNA Oligomer
aaauuugagucaggaacuggugg

SEQ ID NO: 5912 - RNA, 23 nt, artificial
  siRNA Oligomer
aauuugagucaggaacugguggu

SEQ ID NO: 5913 - RNA, 23 nt, artificial
  siRNA Oligomer
auuugagucaggaacugguggug

SEQ ID NO: 5914 - RNA, 23 nt, artificial
  siRNA Oligomer
uuugagucaggaacugguggugu

SEQ ID NO: 5915 - RNA, 23 nt, artificial
  siRNA Oligomer
uugagucaggaacugguggugug

SEQ ID NO: 5916 - RNA, 23 nt, artificial
  siRNA Oligomer
uuguuagaacacuggcuaauuug

SEQ ID NO: 5917 - RNA, 23 nt, artificial
  siRNA Oligomer
uguuagaacacuggcuaauuuga

SEQ ID NO: 5918 - RNA, 23 nt, artificial
  siRNA Oligomer
guuagaacacuggcuaauuugaa

SEQ ID NO: 5919 - RNA, 23 nt, artificial
  siRNA Oligomer
uuagaacacuggcuaauuugaac

SEQ ID NO: 5920 - RNA, 23 nt, artificial
  siRNA Oligomer
uagaacacuggcuaauuugaaca

SEQ ID NO: 5921 - RNA, 23 nt, artificial
  siRNA Oligomer
ggguuucuuauuuagggcaggug

SEQ ID NO: 5922 - RNA, 23 nt, artificial
  siRNA Oligomer
ucacuguuguuccaaucagugag

SEQ ID NO: 5923 - RNA, 23 nt, artificial
  siRNA Oligomer
cacuguuguuccaaucagugagu

SEQ ID NO: 5924 - RNA, 23 nt, artificial
  siRNA Oligomer
acuguuguuccaaucagugagua

SEQ ID NO: 5925 - RNA, 23 nt, artificial
  siRNA Oligomer
cuguuguuccaaucagugaguaa

SEQ ID NO: 5926 - RNA, 23 nt, artificial
  siRNA Oligomer
uguuguuccaaucagugaguaaa

SEQ ID NO: 5927 - RNA, 23 nt, artificial
  siRNA Oligomer
uuggacagacaguucuccagcau

SEQ ID NO: 5928 - RNA, 23 nt, artificial
  siRNA Oligomer
uuaucuuggcccaauucuauaaa

SEQ ID NO: 5929 - RNA, 23 nt, artificial
  siRNA Oligomer
aucuuuccaagcauuugaagagu

SEQ ID NO: 5930 - RNA, 23 nt, artificial
  siRNA Oligomer
ucuuuccaagcauuugaagaguu

SEQ ID NO: 5931 - RNA, 23 nt, artificial
  siRNA Oligomer
cuuuccaagcauuugaagaguuu

SEQ ID NO: 5932 - RNA, 23 nt, artificial
  siRNA Oligomer
uuuccaagcauuugaagaguuua

SEQ ID NO: 5933 - RNA, 23 nt, artificial
  siRNA Oligomer
uuagagugaggaagucaccaaga

SEQ ID NO: 5934 - RNA, 23 nt, artificial
  siRNA Oligomer
aagcuaguccaugagcaguucuc

SEQ ID NO: 5935 - RNA, 23 nt, artificial
  siRNA Oligomer
agcuaguccaugagcaguucucc

SEQ ID NO: 5936 - RNA, 23 nt, artificial
  siRNA Oligomer
gcuaguccaugagcaguucuccu

SEQ ID NO: 5937 - RNA, 23 nt, artificial
  siRNA Oligomer
cuaguccaugagcaguucuccug

SEQ ID NO: 5938 - RNA, 23 nt, artificial
  siRNA Oligomer
uaguccaugagcaguucuccugc

SEQ ID NO: 5939 - RNA, 23 nt, artificial
  siRNA Oligomer
aagcuccuuauccacgacccaca

SEQ ID NO: 5940 - RNA, 23 nt, artificial
  siRNA Oligomer
agcuccuuauccacgacccacag

SEQ ID NO: 5941 - RNA, 23 nt, artificial
  siRNA Oligomer
gcuccuuauccacgacccacagc

SEQ ID NO: 5942 - RNA, 23 nt, artificial
  siRNA Oligomer
ugaacagugacauuuuaggucac

SEQ ID NO: 5943 - RNA, 23 nt, artificial
  siRNA Oligomer
gcaauucucugggucaguuucuc

SEQ ID NO: 5944 - RNA, 23 nt, artificial
  siRNA Oligomer
caauucucugggucaguuucuca

SEQ ID NO: 5945 - RNA, 23 nt, artificial
  siRNA Oligomer
aauucucugggucaguuucucag

SEQ ID NO: 5946 - RNA, 23 nt, artificial
  siRNA Oligomer
auucucugggucaguuucucagg

SEQ ID NO: 5947 - RNA, 23 nt, artificial
  siRNA Oligomer
uucucugggucaguuucucaggg

SEQ ID NO: 5948 - RNA, 23 nt, artificial
  siRNA Oligomer
caaauuugagucaggaacuggug

SEQ ID NO: 5949 - RNA, 23 nt, artificial
  siRNA Oligomer
uucucagggacaaggaccuuuga

SEQ ID NO: 5950 - RNA, 23 nt, artificial
  siRNA Oligomer
ucucagggacaaggaccuuugag

SEQ ID NO: 5951 - RNA, 23 nt, artificial
  siRNA Oligomer
cucagggacaaggaccuuugagc

SEQ ID NO: 5952 - RNA, 23 nt, artificial
  siRNA Oligomer
ucagggacaaggaccuuugagca

SEQ ID NO: 5953 - RNA, 23 nt, artificial
  siRNA Oligomer
uuuuuucuuaacaagucgaaauc

SEQ ID NO: 5954 - RNA, 23 nt, artificial
  siRNA Oligomer
uuuuucuuaacaagucgaaaucc

SEQ ID NO: 5955 - RNA, 23 nt, artificial
  siRNA Oligomer
uuuucuuaacaagucgaaauccu

SEQ ID NO: 5956 - RNA, 23 nt, artificial
  siRNA Oligomer
cacagguauucaucauucacuca

SEQ ID NO: 5957 - RNA, 23 nt, artificial
  siRNA Oligomer
acagguauucaucauucacucaa

SEQ ID NO: 5958 - RNA, 23 nt, artificial
  siRNA Oligomer
cagguauucaucauucacucaau

SEQ ID NO: 5959 - RNA, 23 nt, artificial
  siRNA Oligomer
agguauucaucauucacucaaug

SEQ ID NO: 5960 - RNA, 23 nt, artificial
  siRNA Oligomer
acagugaagcaguuccauuauug

SEQ ID NO: 5961 - RNA, 23 nt, artificial
  siRNA Oligomer
cagugaagcaguuccauuauugc

SEQ ID NO: 5962 - RNA, 23 nt, artificial
  siRNA Oligomer
agugaagcaguuccauuauugcc

SEQ ID NO: 5963 - RNA, 23 nt, artificial
  siRNA Oligomer
gugaagcaguuccauuauugccg

SEQ ID NO: 5964 - RNA, 23 nt, artificial
  siRNA Oligomer
ugaagcaguuccauuauugccgu

SEQ ID NO: 5965 - RNA, 23 nt, artificial
  siRNA Oligomer
agagucaaagauaacuguuagug

SEQ ID NO: 5966 - RNA, 23 nt, artificial
  siRNA Oligomer
gagucaaagauaacuguuagugg

SEQ ID NO: 5967 - RNA, 23 nt, artificial
  siRNA Oligomer
agucaaagauaacuguuagugga

SEQ ID NO: 5968 - RNA, 23 nt, artificial
  siRNA Oligomer
gucaaagauaacuguuaguggaa

SEQ ID NO: 5969 - RNA, 23 nt, artificial
  siRNA Oligomer
ucaaagauaacuguuaguggaaa

SEQ ID NO: 5970 - RNA, 23 nt, artificial
  siRNA Oligomer
aagcucaaaaguagguacgacgc

SEQ ID NO: 5971 - RNA, 23 nt, artificial
  siRNA Oligomer
agcucaaaaguagguacgacgcu

SEQ ID NO: 5972 - RNA, 23 nt, artificial
  siRNA Oligomer
gcucaaaaguagguacgacgcua

SEQ ID NO: 5973 - RNA, 23 nt, artificial
  siRNA Oligomer
cucaaaaguagguacgacgcuag

SEQ ID NO: 5974 - RNA, 23 nt, artificial
  siRNA Oligomer
ucaaaaguagguacgacgcuaga

SEQ ID NO: 5975 - RNA, 23 nt, artificial
  siRNA Oligomer
cagcaauucugaaaugcuggccg

SEQ ID NO: 5976 - RNA, 23 nt, artificial
  siRNA Oligomer
agcaauucugaaaugcuggccgg

SEQ ID NO: 5977 - RNA, 23 nt, artificial
  siRNA Oligomer
gcaauucugaaaugcuggccggg

SEQ ID NO: 5978 - RNA, 23 nt, artificial
  siRNA Oligomer
caauucugaaaugcuggccgggu

SEQ ID NO: 5979 - RNA, 23 nt, artificial
  siRNA Oligomer
aauucugaaaugcuggccggguu

SEQ ID NO: 5980 - RNA, 23 nt, artificial
  siRNA Oligomer
augguucaucugagauuaagcac

SEQ ID NO: 5981 - RNA, 23 nt, artificial
  siRNA Oligomer
ugguucaucugagauuaagcaca

SEQ ID NO: 5982 - RNA, 23 nt, artificial
  siRNA Oligomer
gguucaucugagauuaagcacau

SEQ ID NO: 5983 - RNA, 23 nt, artificial
  siRNA Oligomer
guucaucugagauuaagcacaug

SEQ ID NO: 5984 - RNA, 23 nt, artificial
  siRNA Oligomer
cuucuacuuuugcuuaccuauuc

SEQ ID NO: 5985 - RNA, 23 nt, artificial
  siRNA Oligomer
uucuacuuuugcuuaccuauucc

SEQ ID NO: 5986 - RNA, 23 nt, artificial
  siRNA Oligomer
ucuacuuuugcuuaccuauucca

SEQ ID NO: 5987 - RNA, 23 nt, artificial
  siRNA Oligomer
caaguucacgugcauaacacaac

SEQ ID NO: 5988 - RNA, 23 nt, artificial
  siRNA Oligomer
aaguucacgugcauaacacaacc

SEQ ID NO: 5989 - RNA, 23 nt, artificial
  siRNA Oligomer
aguucacgugcauaacacaaccu

SEQ ID NO: 5990 - RNA, 23 nt, artificial
  siRNA Oligomer
guucacgugcauaacacaaccuc

SEQ ID NO: 5991 - RNA, 23 nt, artificial
  siRNA Oligomer
uucacgugcauaacacaaccucg

SEQ ID NO: 5992 - RNA, 23 nt, artificial
  siRNA Oligomer
aguuucauucucuaggcuguacu

SEQ ID NO: 5993 - RNA, 23 nt, artificial
  siRNA Oligomer
guuucauucucuaggcuguacua

SEQ ID NO: 5994 - RNA, 23 nt, artificial
  siRNA Oligomer
uuucauucucuaggcuguacuau

SEQ ID NO: 5995 - RNA, 23 nt, artificial
  siRNA Oligomer
uucauucucuaggcuguacuaua

SEQ ID NO: 5996 - RNA, 23 nt, artificial
  siRNA Oligomer
ucauucucuaggcuguacuauaa

SEQ ID NO: 5997 - RNA, 23 nt, artificial
  siRNA Oligomer
uugcuuugauuuggacagacagu

SEQ ID NO: 5998 - RNA, 23 nt, artificial
  siRNA Oligomer
cugcuuaaacacaaguguaagcu

SEQ ID NO: 5999 - RNA, 23 nt, artificial
  siRNA Oligomer
ugcuuaaacacaaguguaagcuc

SEQ ID NO: 6000 - RNA, 23 nt, artificial
  siRNA Oligomer
gcuuaaacacaaguguaagcuca

SEQ ID NO: 6001 - RNA, 23 nt, artificial
  siRNA Oligomer
cuuaaacacaaguguaagcucaa

SEQ ID NO: 6002 - RNA, 23 nt, artificial
  siRNA Oligomer
uuaaacacaaguguaagcucaaa

SEQ ID NO: 6003 - RNA, 23 nt, artificial
  siRNA Oligomer
cugaauaguuuuacuacccaauc

SEQ ID NO: 6004 - RNA, 23 nt, artificial
  siRNA Oligomer
ugaauaguuuuacuacccaauca

SEQ ID NO: 6005 - RNA, 23 nt, artificial
  siRNA Oligomer
gaauaguuuuacuacccaaucau

SEQ ID NO: 6006 - RNA, 23 nt, artificial
  siRNA Oligomer
aauaguuuuacuacccaaucaug

SEQ ID NO: 6007 - RNA, 23 nt, artificial
  siRNA Oligomer
acauuuucaauuuccaaguucac

SEQ ID NO: 6008 - RNA, 23 nt, artificial
  siRNA Oligomer
cagcauuuuaaccaaauucuggc

SEQ ID NO: 6009 - RNA, 23 nt, artificial
  siRNA Oligomer
agcauuuuaaccaaauucuggca

SEQ ID NO: 6010 - RNA, 23 nt, artificial
  siRNA Oligomer
gcauuuuaaccaaauucuggcaa

SEQ ID NO: 6011 - RNA, 23 nt, artificial
  siRNA Oligomer
cauuuuaaccaaauucuggcaag

SEQ ID NO: 6012 - RNA, 23 nt, artificial
  siRNA Oligomer
auuuuaaccaaauucuggcaagu

SEQ ID NO: 6013 - RNA, 23 nt, artificial
  siRNA Oligomer
ucuugcugcucaaacugccaguu

SEQ ID NO: 6014 - RNA, 23 nt, artificial
  siRNA Oligomer
cuugcugcucaaacugccaguug

SEQ ID NO: 6015 - RNA, 23 nt, artificial
  siRNA Oligomer
uugcugcucaaacugccaguugc

SEQ ID NO: 6016 - RNA, 23 nt, artificial
  siRNA Oligomer
ggccuuuauuauucccuagugac

SEQ ID NO: 6017 - RNA, 23 nt, artificial
  siRNA Oligomer
gccuuuauuauucccuagugaca

SEQ ID NO: 6018 - RNA, 23 nt, artificial
  siRNA Oligomer
ugaaucagagagggacuagaucu

SEQ ID NO: 6019 - RNA, 23 nt, artificial
  siRNA Oligomer
gaaucagagagggacuagaucuc

SEQ ID NO: 6020 - RNA, 23 nt, artificial
  siRNA Oligomer
aaucagagagggacuagaucuca

SEQ ID NO: 6021 - RNA, 23 nt, artificial
  siRNA Oligomer
aucagagagggacuagaucucag

SEQ ID NO: 6022 - RNA, 23 nt, artificial
  siRNA Oligomer
ucagagagggacuagaucucaga

SEQ ID NO: 6023 - RNA, 23 nt, artificial
  siRNA Oligomer
ucuacaucgaugcccaagaagcc

SEQ ID NO: 6024 - RNA, 23 nt, artificial
  siRNA Oligomer
ggacaucuugagcaauucucugg

SEQ ID NO: 6025 - RNA, 23 nt, artificial
  siRNA Oligomer
gacaucuugagcaauucucuggg

SEQ ID NO: 6026 - RNA, 23 nt, artificial
  siRNA Oligomer
acaucuugagcaauucucugggu

SEQ ID NO: 6027 - RNA, 23 nt, artificial
  siRNA Oligomer
caucuugagcaauucucuggguc

SEQ ID NO: 6028 - RNA, 23 nt, artificial
  siRNA Oligomer
aucuugagcaauucucuggguca

SEQ ID NO: 6029 - RNA, 23 nt, artificial
  siRNA Oligomer
guauucaacacuuaagaacaggg

SEQ ID NO: 6030 - RNA, 23 nt, artificial
  siRNA Oligomer
uauucaacacuuaagaacagggg

SEQ ID NO: 6031 - RNA, 23 nt, artificial
  siRNA Oligomer
auucaacacuuaagaacagggga

SEQ ID NO: 6032 - RNA, 23 nt, artificial
  siRNA Oligomer
uucaacacuuaagaacaggggaa

SEQ ID NO: 6033 - RNA, 23 nt, artificial
  siRNA Oligomer
ucaacacuuaagaacaggggaaa

SEQ ID NO: 6034 - RNA, 23 nt, artificial
  siRNA Oligomer
ucuugagcaauucucugggucag

SEQ ID NO: 6035 - RNA, 23 nt, artificial
  siRNA Oligomer
cuugagcaauucucugggucagu

SEQ ID NO: 6036 - RNA, 23 nt, artificial
  siRNA Oligomer
uugagcaauucucugggucaguu

SEQ ID NO: 6037 - RNA, 23 nt, artificial
  siRNA Oligomer
uuugaaucacuucuccaaaggcc

SEQ ID NO: 6038 - RNA, 23 nt, artificial
  siRNA Oligomer
gagaugagauaacacugccaugg

SEQ ID NO: 6039 - RNA, 23 nt, artificial
  siRNA Oligomer
agaugagauaacacugccauggu

SEQ ID NO: 6040 - RNA, 23 nt, artificial
  siRNA Oligomer
gaugagauaacacugccauggug

SEQ ID NO: 6041 - RNA, 23 nt, artificial
  siRNA Oligomer
augagauaacacugccaugguga

SEQ ID NO: 6042 - RNA, 23 nt, artificial
  siRNA Oligomer
ugagauaacacugccauggugaa

SEQ ID NO: 6043 - RNA, 23 nt, artificial
  siRNA Oligomer
uaacaagucgaaauccugagcug

SEQ ID NO: 6044 - RNA, 23 nt, artificial
  siRNA Oligomer
cuacuuaauccuaccuuccuguc

SEQ ID NO: 6045 - RNA, 23 nt, artificial
  siRNA Oligomer
uacuuaauccuaccuuccugucu

SEQ ID NO: 6046 - RNA, 23 nt, artificial
  siRNA Oligomer
acuuaauccuaccuuccugucua

SEQ ID NO: 6047 - RNA, 23 nt, artificial
  siRNA Oligomer
cuuaauccuaccuuccugucuaa

SEQ ID NO: 6048 - RNA, 23 nt, artificial
  siRNA Oligomer
uuaauccuaccuuccugucuaaa

SEQ ID NO: 6049 - RNA, 23 nt, artificial
  siRNA Oligomer
uauauuuucccuuuuuaggaccc

SEQ ID NO: 6050 - RNA, 23 nt, artificial
  siRNA Oligomer
auauuuucccuuuuuaggacccu

SEQ ID NO: 6051 - RNA, 23 nt, artificial
  siRNA Oligomer
uauuuucccuuuuuaggacccuu

SEQ ID NO: 6052 - RNA, 23 nt, artificial
  siRNA Oligomer
aaaccugaauaagcuccuuaucc

SEQ ID NO: 6053 - RNA, 23 nt, artificial
  siRNA Oligomer
aaccugaauaagcuccuuaucca

SEQ ID NO: 6054 - RNA, 23 nt, artificial
  siRNA Oligomer
accugaauaagcuccuuauccac

SEQ ID NO: 6055 - RNA, 23 nt, artificial
  siRNA Oligomer
uuaauuuaacagccuuccauaag

SEQ ID NO: 6056 - RNA, 23 nt, artificial
  siRNA Oligomer
ggucaacggcucuguuuccuucg

SEQ ID NO: 6057 - RNA, 23 nt, artificial
  siRNA Oligomer
gucaacggcucuguuuccuucgc

SEQ ID NO: 6058 - RNA, 23 nt, artificial
  siRNA Oligomer
ucaacggcucuguuuccuucgcg

SEQ ID NO: 6059 - RNA, 23 nt, artificial
  siRNA Oligomer
caacggcucuguuuccuucgcga

SEQ ID NO: 6060 - RNA, 23 nt, artificial
  siRNA Oligomer
aacggcucuguuuccuucgcgag

SEQ ID NO: 6061 - RNA, 23 nt, artificial
  siRNA Oligomer
ugaagaguuuaguuuguuagaac

SEQ ID NO: 6062 - RNA, 23 nt, artificial
  siRNA Oligomer
gaagaguuuaguuuguuagaaca

SEQ ID NO: 6063 - RNA, 23 nt, artificial
  siRNA Oligomer
aguauucaacacuuaagaacagg

SEQ ID NO: 6064 - RNA, 23 nt, artificial
  siRNA Oligomer
ggaauaagacaaaaaauaaggcc

SEQ ID NO: 6065 - RNA, 23 nt, artificial
  siRNA Oligomer
gaauaagacaaaaaauaaggccu

SEQ ID NO: 6066 - RNA, 23 nt, artificial
  siRNA Oligomer
aauaagacaaaaaauaaggccuu

SEQ ID NO: 6067 - RNA, 23 nt, artificial
  siRNA Oligomer
auaagacaaaaaauaaggccuuu

SEQ ID NO: 6068 - RNA, 23 nt, artificial
  siRNA Oligomer
uaagacaaaaaauaaggccuuua

SEQ ID NO: 6069 - RNA, 23 nt, artificial
  siRNA Oligomer
agauuacuaagugaaucagagag

SEQ ID NO: 6070 - RNA, 23 nt, artificial
  siRNA Oligomer
gauuacuaagugaaucagagagg

SEQ ID NO: 6071 - RNA, 23 nt, artificial
  siRNA Oligomer
auuacuaagugaaucagagaggg

SEQ ID NO: 6072 - RNA, 23 nt, artificial
  siRNA Oligomer
uuacuaagugaaucagagaggga

SEQ ID NO: 6073 - RNA, 23 nt, artificial
  siRNA Oligomer
uacuaagugaaucagagagggac

SEQ ID NO: 6074 - RNA, 23 nt, artificial
  siRNA Oligomer
ggacaacaguucuacaucgaugc

SEQ ID NO: 6075 - RNA, 23 nt, artificial
  siRNA Oligomer
gacaacaguucuacaucgaugcc

SEQ ID NO: 6076 - RNA, 23 nt, artificial
  siRNA Oligomer
acaacaguucuacaucgaugccc

SEQ ID NO: 6077 - RNA, 23 nt, artificial
  siRNA Oligomer
caacaguucuacaucgaugccca

SEQ ID NO: 6078 - RNA, 23 nt, artificial
  siRNA Oligomer
aacaguucuacaucgaugcccaa

SEQ ID NO: 6079 - RNA, 23 nt, artificial
  siRNA Oligomer
uaagcucaaaaguagguacgacg

SEQ ID NO: 6080 - RNA, 23 nt, artificial
  siRNA Oligomer
uaucuggacggugaguuucauuc

SEQ ID NO: 6081 - RNA, 23 nt, artificial
  siRNA Oligomer
aucuggacggugaguuucauucu

SEQ ID NO: 6082 - RNA, 23 nt, artificial
  siRNA Oligomer
ucuggacggugaguuucauucuc

SEQ ID NO: 6083 - RNA, 23 nt, artificial
  siRNA Oligomer
cuggacggugaguuucauucucu

SEQ ID NO: 6084 - RNA, 23 nt, artificial
  siRNA Oligomer
uggacggugaguuucauucucua

SEQ ID NO: 6085 - RNA, 23 nt, artificial
  siRNA Oligomer
accuuuggagcuuaacaauagac

SEQ ID NO: 6086 - RNA, 23 nt, artificial
  siRNA Oligomer
ccuuuggagcuuaacaauagaca

SEQ ID NO: 6087 - RNA, 23 nt, artificial
  siRNA Oligomer
cuuuggagcuuaacaauagacau

SEQ ID NO: 6088 - RNA, 23 nt, artificial
  siRNA Oligomer
uuuggagcuuaacaauagacaug

SEQ ID NO: 6089 - RNA, 23 nt, artificial
  siRNA Oligomer
uuggagcuuaacaauagacaugc

SEQ ID NO: 6090 - RNA, 23 nt, artificial
  siRNA Oligomer
caaauauuaccucguugagguug

SEQ ID NO: 6091 - RNA, 23 nt, artificial
  siRNA Oligomer
aaauauuaccucguugagguugg

SEQ ID NO: 6092 - RNA, 23 nt, artificial
  siRNA Oligomer
aauauuaccucguugagguuggg

SEQ ID NO: 6093 - RNA, 23 nt, artificial
  siRNA Oligomer
auauuaccucguugagguugggu

SEQ ID NO: 6094 - RNA, 23 nt, artificial
  siRNA Oligomer
uauuaccucguugagguuggguu

SEQ ID NO: 6095 - RNA, 23 nt, artificial
  siRNA Oligomer
acaacauugauuuaucuuggccc

SEQ ID NO: 6096 - RNA, 23 nt, artificial
  siRNA Oligomer
caacauugauuuaucuuggccca

SEQ ID NO: 6097 - RNA, 23 nt, artificial
  siRNA Oligomer
aacauugauuuaucuuggcccaa

SEQ ID NO: 6098 - RNA, 23 nt, artificial
  siRNA Oligomer
acauugauuuaucuuggcccaau

SEQ ID NO: 6099 - RNA, 23 nt, artificial
  siRNA Oligomer
cauugauuuaucuuggcccaauu

SEQ ID NO: 6100 - RNA, 23 nt, artificial
  siRNA Oligomer
uauagucuauuaccaagccuacc

SEQ ID NO: 6101 - RNA, 23 nt, artificial
  siRNA Oligomer
aaguugauuccucaaauauuacc

SEQ ID NO: 6102 - RNA, 23 nt, artificial
  siRNA Oligomer
aguugauuccucaaauauuaccu

SEQ ID NO: 6103 - RNA, 23 nt, artificial
  siRNA Oligomer
guugauuccucaaauauuaccuc

SEQ ID NO: 6104 - RNA, 23 nt, artificial
  siRNA Oligomer
uccuauccagcuuuuuacauaca

SEQ ID NO: 6105 - RNA, 23 nt, artificial
  siRNA Oligomer
ccuauccagcuuuuuacauacau

SEQ ID NO: 6106 - RNA, 23 nt, artificial
  siRNA Oligomer
cuauccagcuuuuuacauacauu

SEQ ID NO: 6107 - RNA, 23 nt, artificial
  siRNA Oligomer
uauccagcuuuuuacauacauuu

SEQ ID NO: 6108 - RNA, 23 nt, artificial
  siRNA Oligomer
gacuucguaaauugacccguuuc

SEQ ID NO: 6109 - RNA, 23 nt, artificial
  siRNA Oligomer
acuucguaaauugacccguuuca

SEQ ID NO: 6110 - RNA, 23 nt, artificial
  siRNA Oligomer
cuucguaaauugacccguuucaa

SEQ ID NO: 6111 - RNA, 23 nt, artificial
  siRNA Oligomer
uucguaaauugacccguuucaau

SEQ ID NO: 6112 - RNA, 23 nt, artificial
  siRNA Oligomer
ucguaaauugacccguuucaaua

SEQ ID NO: 6113 - RNA, 23 nt, artificial
  siRNA Oligomer
cugcucaaacugccaguugcaac

SEQ ID NO: 6114 - RNA, 23 nt, artificial
  siRNA Oligomer
ugcucaaacugccaguugcaacc

SEQ ID NO: 6115 - RNA, 23 nt, artificial
  siRNA Oligomer
gcucaaacugccaguugcaacca

SEQ ID NO: 6116 - RNA, 23 nt, artificial
  siRNA Oligomer
cucaaacugccaguugcaaccau

SEQ ID NO: 6117 - RNA, 23 nt, artificial
  siRNA Oligomer
ucaaacugccaguugcaaccaug

SEQ ID NO: 6118 - RNA, 23 nt, artificial
  siRNA Oligomer
gacggugaguuucauucucuagg

SEQ ID NO: 6119 - RNA, 23 nt, artificial
  siRNA Oligomer
acggugaguuucauucucuaggc

SEQ ID NO: 6120 - RNA, 23 nt, artificial
  siRNA Oligomer
cggugaguuucauucucuaggcu

SEQ ID NO: 6121 - RNA, 23 nt, artificial
  siRNA Oligomer
ggugaguuucauucucuaggcug

SEQ ID NO: 6122 - RNA, 23 nt, artificial
  siRNA Oligomer
gugaguuucauucucuaggcugu

SEQ ID NO: 6123 - RNA, 23 nt, artificial
  siRNA Oligomer
guagucaaaaucacuuagcaggc

SEQ ID NO: 6124 - RNA, 23 nt, artificial
  siRNA Oligomer
uagucaaaaucacuuagcaggcu

SEQ ID NO: 6125 - RNA, 23 nt, artificial
  siRNA Oligomer
agucaaaaucacuuagcaggcuc

SEQ ID NO: 6126 - RNA, 23 nt, artificial
  siRNA Oligomer
gucaaaaucacuuagcaggcucu

SEQ ID NO: 6127 - RNA, 23 nt, artificial
  siRNA Oligomer
ucaaaaucacuuagcaggcucuc

SEQ ID NO: 6128 - RNA, 23 nt, artificial
  siRNA Oligomer
agcaugugaaguggagcuaauag

SEQ ID NO: 6129 - RNA, 23 nt, artificial
  siRNA Oligomer
gcaugugaaguggagcuaauagc

SEQ ID NO: 6130 - RNA, 23 nt, artificial
  siRNA Oligomer
caugugaaguggagcuaauagcu

SEQ ID NO: 6131 - RNA, 23 nt, artificial
  siRNA Oligomer
augugaaguggagcuaauagcua

SEQ ID NO: 6132 - RNA, 23 nt, artificial
  siRNA Oligomer
ugugaaguggagcuaauagcuag

SEQ ID NO: 6133 - RNA, 23 nt, artificial
  siRNA Oligomer
uuaggacccuucaaucacuguug

SEQ ID NO: 6134 - RNA, 23 nt, artificial
  siRNA Oligomer
gugguaguauacagcuacuaccc

SEQ ID NO: 6135 - RNA, 23 nt, artificial
  siRNA Oligomer
ugguaguauacagcuacuacccu

SEQ ID NO: 6136 - RNA, 23 nt, artificial
  siRNA Oligomer
gguaguauacagcuacuacccuu

SEQ ID NO: 6137 - RNA, 23 nt, artificial
  siRNA Oligomer
aauuaaacucaccuacuuaaucc

SEQ ID NO: 6138 - RNA, 23 nt, artificial
  siRNA Oligomer
auuaaacucaccuacuuaauccu

SEQ ID NO: 6139 - RNA, 23 nt, artificial
  siRNA Oligomer
uuaaacucaccuacuuaauccua

SEQ ID NO: 6140 - RNA, 23 nt, artificial
  siRNA Oligomer
uaaacucaccuacuuaauccuac

SEQ ID NO: 6141 - RNA, 23 nt, artificial
  siRNA Oligomer
aaacucaccuacuuaauccuacc

SEQ ID NO: 6142 - RNA, 23 nt, artificial
  siRNA Oligomer
aacaauagacaugcaaaacaaca

SEQ ID NO: 6143 - RNA, 23 nt, artificial
  siRNA Oligomer
acaauagacaugcaaaacaacau

SEQ ID NO: 6144 - RNA, 23 nt, artificial
  siRNA Oligomer
caauagacaugcaaaacaacauu

SEQ ID NO: 6145 - RNA, 23 nt, artificial
  siRNA Oligomer
aauagacaugcaaaacaacauug

SEQ ID NO: 6146 - RNA, 23 nt, artificial
  siRNA Oligomer
auagacaugcaaaacaacauuga

SEQ ID NO: 6147 - RNA, 23 nt, artificial
  siRNA Oligomer
cccuucaaauuugagucaggaac

SEQ ID NO: 6148 - RNA, 23 nt, artificial
  siRNA Oligomer
ccuucaaauuugagucaggaacu

SEQ ID NO: 6149 - RNA, 23 nt, artificial
  siRNA Oligomer
cuucaaauuugagucaggaacug

SEQ ID NO: 6150 - RNA, 23 nt, artificial
  siRNA Oligomer
uucaaauuugagucaggaacugg

SEQ ID NO: 6151 - RNA, 23 nt, artificial
  siRNA Oligomer
ucaaauuugagucaggaacuggu

SEQ ID NO: 6152 - RNA, 23 nt, artificial
  siRNA Oligomer
ucuaaaacaacaccgugguuacu

SEQ ID NO: 6153 - RNA, 23 nt, artificial
  siRNA Oligomer
cuaaaacaacaccgugguuacug

SEQ ID NO: 6154 - RNA, 23 nt, artificial
  siRNA Oligomer
uaaaacaacaccgugguuacuga

SEQ ID NO: 6155 - RNA, 23 nt, artificial
  siRNA Oligomer
aaaacaacaccgugguuacugaa

SEQ ID NO: 6156 - RNA, 23 nt, artificial
  siRNA Oligomer
aaacaacaccgugguuacugaaa

SEQ ID NO: 6157 - RNA, 23 nt, artificial
  siRNA Oligomer
aacaacaccgugguuacugaaau

SEQ ID NO: 6158 - RNA, 23 nt, artificial
  siRNA Oligomer
gguauccaagguggaaaaaaucu

SEQ ID NO: 6159 - RNA, 23 nt, artificial
  siRNA Oligomer
guauccaagguggaaaaaaucug

SEQ ID NO: 6160 - RNA, 23 nt, artificial
  siRNA Oligomer
uauccaagguggaaaaaaucugg

SEQ ID NO: 6161 - RNA, 23 nt, artificial
  siRNA Oligomer
auccaagguggaaaaaaucuggg

SEQ ID NO: 6162 - RNA, 23 nt, artificial
  siRNA Oligomer
uccaagguggaaaaaaucugggu

SEQ ID NO: 6163 - RNA, 23 nt, artificial
  siRNA Oligomer
gaaaaucaaaauaggcaaaucug

SEQ ID NO: 6164 - RNA, 23 nt, artificial
  siRNA Oligomer
cauucucuaggcuguacuauaaa

SEQ ID NO: 6165 - RNA, 23 nt, artificial
  siRNA Oligomer
auucucuaggcuguacuauaaac

SEQ ID NO: 6166 - RNA, 23 nt, artificial
  siRNA Oligomer
uucucuaggcuguacuauaaacc

SEQ ID NO: 6167 - RNA, 23 nt, artificial
  siRNA Oligomer
ucacgugcauaacacaaccucgc

SEQ ID NO: 6168 - RNA, 23 nt, artificial
  siRNA Oligomer
auuauucccuagugacagguauc

SEQ ID NO: 6169 - RNA, 23 nt, artificial
  siRNA Oligomer
uuauucccuagugacagguaucc

SEQ ID NO: 6170 - RNA, 23 nt, artificial
  siRNA Oligomer
uauucccuagugacagguaucca

SEQ ID NO: 6171 - RNA, 23 nt, artificial
  siRNA Oligomer
auucccuagugacagguauccaa

SEQ ID NO: 6172 - RNA, 23 nt, artificial
  siRNA Oligomer
uucccuagugacagguauccaag

SEQ ID NO: 6173 - RNA, 23 nt, artificial
  siRNA Oligomer
auugccguaauauuucucauuua

SEQ ID NO: 6174 - RNA, 23 nt, artificial
  siRNA Oligomer
gggcuuuuggaaguuuugauagg

SEQ ID NO: 6175 - RNA, 23 nt, artificial
  siRNA Oligomer
gaugaauacaucugucccuacgc

SEQ ID NO: 6176 - RNA, 23 nt, artificial
  siRNA Oligomer
augaauacaucugucccuacgcc

SEQ ID NO: 6177 - RNA, 23 nt, artificial
  siRNA Oligomer
ugaauacaucugucccuacgccg

SEQ ID NO: 6178 - RNA, 23 nt, artificial
  siRNA Oligomer
gaauacaucugucccuacgccgg

SEQ ID NO: 6179 - RNA, 23 nt, artificial
  siRNA Oligomer
aauacaucugucccuacgccggu

SEQ ID NO: 6180 - RNA, 23 nt, artificial
  siRNA Oligomer
cauuuuaggucacuuauaguauc

SEQ ID NO: 6181 - RNA, 23 nt, artificial
  siRNA Oligomer
auuuuaggucacuuauaguauca

SEQ ID NO: 6182 - RNA, 23 nt, artificial
  siRNA Oligomer
uuuuaggucacuuauaguaucag

SEQ ID NO: 6183 - RNA, 23 nt, artificial
  siRNA Oligomer
uuuaggucacuuauaguaucagu

SEQ ID NO: 6184 - RNA, 23 nt, artificial
  siRNA Oligomer
uuaggucacuuauaguaucagua

SEQ ID NO: 6185 - RNA, 23 nt, artificial
  siRNA Oligomer
cuccauagccaaugcagacuucg

SEQ ID NO: 6186 - RNA, 23 nt, artificial
  siRNA Oligomer
uccauagccaaugcagacuucgu

SEQ ID NO: 6187 - RNA, 23 nt, artificial
  siRNA Oligomer
ccauagccaaugcagacuucgua

SEQ ID NO: 6188 - RNA, 23 nt, artificial
  siRNA Oligomer
cauagccaaugcagacuucguaa

SEQ ID NO: 6189 - RNA, 23 nt, artificial
  siRNA Oligomer
auagccaaugcagacuucguaaa

SEQ ID NO: 6190 - RNA, 23 nt, artificial
  siRNA Oligomer
uagaaucacacacaauccuaucc

SEQ ID NO: 6191 - RNA, 23 nt, artificial
  siRNA Oligomer
agaaucacacacaauccuaucca

SEQ ID NO: 6192 - RNA, 23 nt, artificial
  siRNA Oligomer
gaaucacacacaauccuauccag

SEQ ID NO: 6193 - RNA, 23 nt, artificial
  siRNA Oligomer
aaucacacacaauccuauccagc

SEQ ID NO: 6194 - RNA, 23 nt, artificial
  siRNA Oligomer
aucacacacaauccuauccagcu

SEQ ID NO: 6195 - RNA, 23 nt, artificial
  siRNA Oligomer
uugaaucacuucuccaaaggcca

SEQ ID NO: 6196 - RNA, 23 nt, artificial
  siRNA Oligomer
ugaaucacuucuccaaaggccag

SEQ ID NO: 6197 - RNA, 23 nt, artificial
  siRNA Oligomer
gaaucacuucuccaaaggccaga

SEQ ID NO: 6198 - RNA, 23 nt, artificial
  siRNA Oligomer
aaucacuucuccaaaggccagaa

SEQ ID NO: 6199 - RNA, 23 nt, artificial
  siRNA Oligomer
ggcuucuacuuuugcuuaccuau

SEQ ID NO: 6200 - RNA, 23 nt, artificial
  siRNA Oligomer
gcuucuacuuuugcuuaccuauu

SEQ ID NO: 6201 - RNA, 23 nt, artificial
  siRNA Oligomer
aacucaccuacuuaauccuaccu

SEQ ID NO: 6202 - RNA, 23 nt, artificial
  siRNA Oligomer
acucaccuacuuaauccuaccuu

SEQ ID NO: 6203 - RNA, 23 nt, artificial
  siRNA Oligomer
cucaccuacuuaauccuaccuuc

SEQ ID NO: 6204 - RNA, 23 nt, artificial
  siRNA Oligomer
ucaccuacuuaauccuaccuucc

SEQ ID NO: 6205 - RNA, 23 nt, artificial
  siRNA Oligomer
uaauuaaacucaccuacuuaauc

SEQ ID NO: 6206 - RNA, 23 nt, artificial
  siRNA Oligomer
caccuacuuaauccuaccuuccu

SEQ ID NO: 6207 - RNA, 23 nt, artificial
  siRNA Oligomer
accuacuuaauccuaccuuccug

SEQ ID NO: 6208 - RNA, 23 nt, artificial
  siRNA Oligomer
ccuacuuaauccuaccuuccugu

SEQ ID NO: 6209 - RNA, 23 nt, artificial
  siRNA Oligomer
ucaguaacaggaucacaccuguu

SEQ ID NO: 6210 - RNA, 23 nt, artificial
  siRNA Oligomer
aaagucccugaagcuaguccaug

SEQ ID NO: 6211 - RNA, 23 nt, artificial
  siRNA Oligomer
aagucccugaagcuaguccauga

SEQ ID NO: 6212 - RNA, 23 nt, artificial
  siRNA Oligomer
agucccugaagcuaguccaugag

SEQ ID NO: 6213 - RNA, 23 nt, artificial
  siRNA Oligomer
gucccugaagcuaguccaugagc

SEQ ID NO: 6214 - RNA, 23 nt, artificial
  siRNA Oligomer
ucccugaagcuaguccaugagca

SEQ ID NO: 6215 - RNA, 23 nt, artificial
  siRNA Oligomer
uccugucuaaaaacccuucaaau

SEQ ID NO: 6216 - RNA, 23 nt, artificial
  siRNA Oligomer
uaggacccuucaaucacuguugu

SEQ ID NO: 6217 - RNA, 23 nt, artificial
  siRNA Oligomer
uccaucccauucaauucuguaca

SEQ ID NO: 6218 - RNA, 23 nt, artificial
  siRNA Oligomer
ccaucccauucaauucuguacaa

SEQ ID NO: 6219 - RNA, 23 nt, artificial
  siRNA Oligomer
caucccauucaauucuguacaaa

SEQ ID NO: 6220 - RNA, 23 nt, artificial
  siRNA Oligomer
aucccauucaauucuguacaaaa

SEQ ID NO: 6221 - RNA, 23 nt, artificial
  siRNA Oligomer
ucccauucaauucuguacaaaaa

SEQ ID NO: 6222 - RNA, 23 nt, artificial
  siRNA Oligomer
uccucaaauauuaccucguugag

SEQ ID NO: 6223 - RNA, 23 nt, artificial
  siRNA Oligomer
ccucaaauauuaccucguugagg

SEQ ID NO: 6224 - RNA, 23 nt, artificial
  siRNA Oligomer
cucaaauauuaccucguugaggu

SEQ ID NO: 6225 - RNA, 23 nt, artificial
  siRNA Oligomer
ucaaauauuaccucguugagguu

SEQ ID NO: 6226 - RNA, 23 nt, artificial
  siRNA Oligomer
caauucccagaaaagcccagaga

SEQ ID NO: 6227 - RNA, 23 nt, artificial
  siRNA Oligomer
aauucccagaaaagcccagagau

SEQ ID NO: 6228 - RNA, 23 nt, artificial
  siRNA Oligomer
auucccagaaaagcccagagaug

SEQ ID NO: 6229 - RNA, 23 nt, artificial
  siRNA Oligomer
uucccagaaaagcccagagauga

SEQ ID NO: 6230 - RNA, 23 nt, artificial
  siRNA Oligomer
ugcauaacacaaccucgcaagcc

SEQ ID NO: 6231 - RNA, 23 nt, artificial
  siRNA Oligomer
gcauaacacaaccucgcaagccg

SEQ ID NO: 6232 - RNA, 23 nt, artificial
  siRNA Oligomer
cauaacacaaccucgcaagccgc

SEQ ID NO: 6233 - RNA, 23 nt, artificial
  siRNA Oligomer
auaacacaaccucgcaagccgca

SEQ ID NO: 6234 - RNA, 23 nt, artificial
  siRNA Oligomer
uaacacaaccucgcaagccgcag

SEQ ID NO: 6235 - RNA, 23 nt, artificial
  siRNA Oligomer
gaagcaguuccauuauugccgua

SEQ ID NO: 6236 - RNA, 23 nt, artificial
  siRNA Oligomer
aagcaguuccauuauugccguaa

SEQ ID NO: 6237 - RNA, 23 nt, artificial
  siRNA Oligomer
agcaguuccauuauugccguaau

SEQ ID NO: 6238 - RNA, 23 nt, artificial
  siRNA Oligomer
guuguuccaaucagugaguaaag

SEQ ID NO: 6239 - RNA, 23 nt, artificial
  siRNA Oligomer
uuguuccaaucagugaguaaagu

SEQ ID NO: 6240 - RNA, 23 nt, artificial
  siRNA Oligomer
uguuccaaucagugaguaaaguu

SEQ ID NO: 6241 - RNA, 23 nt, artificial
  siRNA Oligomer
guuccaaucagugaguaaaguuu

SEQ ID NO: 6242 - RNA, 23 nt, artificial
  siRNA Oligomer
uuccaaucagugaguaaaguuuu

SEQ ID NO: 6243 - RNA, 23 nt, artificial
  siRNA Oligomer
uaauccuaccuuccugucuaaaa

SEQ ID NO: 6244 - RNA, 23 nt, artificial
  siRNA Oligomer
aaaacauuagagugaggaaguca

SEQ ID NO: 6245 - RNA, 23 nt, artificial
  siRNA Oligomer
gaccucuacuaaagaaaaagucc

SEQ ID NO: 6246 - RNA, 23 nt, artificial
  siRNA Oligomer
accucuacuaaagaaaaaguccc

SEQ ID NO: 6247 - RNA, 23 nt, artificial
  siRNA Oligomer
ccucuacuaaagaaaaagucccu

SEQ ID NO: 6248 - RNA, 23 nt, artificial
  siRNA Oligomer
cucuacuaaagaaaaagucccug

SEQ ID NO: 6249 - RNA, 23 nt, artificial
  siRNA Oligomer
ucuacuaaagaaaaagucccuga

SEQ ID NO: 6250 - RNA, 23 nt, artificial
  siRNA Oligomer
auagauuacuaagugaaucagag

SEQ ID NO: 6251 - RNA, 23 nt, artificial
  siRNA Oligomer
uagauuacuaagugaaucagaga

SEQ ID NO: 6252 - RNA, 23 nt, artificial
  siRNA Oligomer
aaaauaaggccuuuauuauuccc

SEQ ID NO: 6253 - RNA, 23 nt, artificial
  siRNA Oligomer
aaauaaggccuuuauuauucccu

SEQ ID NO: 6254 - RNA, 23 nt, artificial
  siRNA Oligomer
aauaaggccuuuauuauucccua

SEQ ID NO: 6255 - RNA, 23 nt, artificial
  siRNA Oligomer
auaaggccuuuauuauucccuag

SEQ ID NO: 6256 - RNA, 23 nt, artificial
  siRNA Oligomer
uaaggccuuuauuauucccuagu

SEQ ID NO: 6257 - RNA, 23 nt, artificial
  siRNA Oligomer
aauuuccuauccucacagguauu

SEQ ID NO: 6258 - RNA, 23 nt, artificial
  siRNA Oligomer
auuuccuauccucacagguauuc

SEQ ID NO: 6259 - RNA, 23 nt, artificial
  siRNA Oligomer
uuuccuauccucacagguauuca

SEQ ID NO: 6260 - RNA, 23 nt, artificial
  siRNA Oligomer
ucccuagugacagguauccaagg

SEQ ID NO: 6261 - RNA, 23 nt, artificial
  siRNA Oligomer
aaagaaaaagucccugaagcuag

SEQ ID NO: 6262 - RNA, 23 nt, artificial
  siRNA Oligomer
aagaaaaagucccugaagcuagu

SEQ ID NO: 6263 - RNA, 23 nt, artificial
  siRNA Oligomer
agaaaaagucccugaagcuaguc

SEQ ID NO: 6264 - RNA, 23 nt, artificial
  siRNA Oligomer
gaaaaagucccugaagcuagucc

SEQ ID NO: 6265 - RNA, 23 nt, artificial
  siRNA Oligomer
aaaaagucccugaagcuagucca

SEQ ID NO: 6266 - RNA, 23 nt, artificial
  siRNA Oligomer
aagauuggcuuuguaguaucuuu

SEQ ID NO: 6267 - RNA, 23 nt, artificial
  siRNA Oligomer
ucacacacaauccuauccagcuu

SEQ ID NO: 6268 - RNA, 23 nt, artificial
  siRNA Oligomer
gugguuacugaaauggcaccaca

SEQ ID NO: 6269 - RNA, 23 nt, artificial
  siRNA Oligomer
ugguuacugaaauggcaccacaa

SEQ ID NO: 6270 - RNA, 23 nt, artificial
  siRNA Oligomer
gguuacugaaauggcaccacaag

SEQ ID NO: 6271 - RNA, 23 nt, artificial
  siRNA Oligomer
guuacugaaauggcaccacaagc

SEQ ID NO: 6272 - RNA, 23 nt, artificial
  siRNA Oligomer
uuacugaaauggcaccacaagcu

SEQ ID NO: 6273 - RNA, 23 nt, artificial
  siRNA Oligomer
uaucuuggcccaauucuauaaag

SEQ ID NO: 6274 - RNA, 23 nt, artificial
  siRNA Oligomer
cuauuaccaagccuaccugaaac

SEQ ID NO: 6275 - RNA, 23 nt, artificial
  siRNA Oligomer
uauuaccaagccuaccugaaacc

SEQ ID NO: 6276 - RNA, 23 nt, artificial
  siRNA Oligomer
auuaccaagccuaccugaaacca

SEQ ID NO: 6277 - RNA, 23 nt, artificial
  siRNA Oligomer
uuaccaagccuaccugaaaccaa

SEQ ID NO: 6278 - RNA, 23 nt, artificial
  siRNA Oligomer
uaccaagccuaccugaaaccaaa

SEQ ID NO: 6279 - RNA, 23 nt, artificial
  siRNA Oligomer
auaagcuccuuauccacgaccca

SEQ ID NO: 6280 - RNA, 23 nt, artificial
  siRNA Oligomer
uaagcuccuuauccacgacccac

SEQ ID NO: 6281 - RNA, 23 nt, artificial
  siRNA Oligomer
gccuuccauaagccaucaccauu

SEQ ID NO: 6282 - RNA, 23 nt, artificial
  siRNA Oligomer
ccuuccauaagccaucaccauuu

SEQ ID NO: 6283 - RNA, 23 nt, artificial
  siRNA Oligomer
cuuccauaagccaucaccauuuu

SEQ ID NO: 6284 - RNA, 23 nt, artificial
  siRNA Oligomer
uuccauaagccaucaccauuuug

SEQ ID NO: 6285 - RNA, 23 nt, artificial
  siRNA Oligomer
uacugaaauggcaccacaagcuu

SEQ ID NO: 6286 - RNA, 23 nt, artificial
  siRNA Oligomer
acugaaauggcaccacaagcuuu

SEQ ID NO: 6287 - RNA, 23 nt, artificial
  siRNA Oligomer
cugaaauggcaccacaagcuuuu

SEQ ID NO: 6288 - RNA, 23 nt, artificial
  siRNA Oligomer
gggcuucuacuuuugcuuaccua

SEQ ID NO: 6289 - RNA, 23 nt, artificial
  siRNA Oligomer
cuucuccaaaggccagaaaauca

SEQ ID NO: 6290 - RNA, 23 nt, artificial
  siRNA Oligomer
uucuccaaaggccagaaaaucag

SEQ ID NO: 6291 - RNA, 23 nt, artificial
  siRNA Oligomer
ucuccaaaggccagaaaaucagc

SEQ ID NO: 6292 - RNA, 23 nt, artificial
  siRNA Oligomer
uccaaaggccagaaaaucagccu

SEQ ID NO: 6293 - RNA, 23 nt, artificial
  siRNA Oligomer
cuacaucgaugcccaagaagccu

SEQ ID NO: 6294 - RNA, 23 nt, artificial
  siRNA Oligomer
uacaucgaugcccaagaagccuu

SEQ ID NO: 6295 - RNA, 23 nt, artificial
  siRNA Oligomer
acaucgaugcccaagaagccuug

SEQ ID NO: 6296 - RNA, 23 nt, artificial
  siRNA Oligomer
ugcaugcaugguuaucuggacgg

SEQ ID NO: 6297 - RNA, 23 nt, artificial
  siRNA Oligomer
gcaugcaugguuaucuggacggu

SEQ ID NO: 6298 - RNA, 23 nt, artificial
  siRNA Oligomer
caugcaugguuaucuggacggug

SEQ ID NO: 6299 - RNA, 23 nt, artificial
  siRNA Oligomer
augcaugguuaucuggacgguga

SEQ ID NO: 6300 - RNA, 23 nt, artificial
  siRNA Oligomer
ugcaugguuaucuggacggugag

SEQ ID NO: 6301 - RNA, 23 nt, artificial
  siRNA Oligomer
aaaaucugggugcaugcaugguu

SEQ ID NO: 6302 - RNA, 23 nt, artificial
  siRNA Oligomer
aaaucugggugcaugcaugguua

SEQ ID NO: 6303 - RNA, 23 nt, artificial
  siRNA Oligomer
aaucugggugcaugcaugguuau

SEQ ID NO: 6304 - RNA, 23 nt, artificial
  siRNA Oligomer
aucugggugcaugcaugguuauc

SEQ ID NO: 6305 - RNA, 23 nt, artificial
  siRNA Oligomer
ucugggugcaugcaugguuaucu

SEQ ID NO: 6306 - RNA, 23 nt, artificial
  siRNA Oligomer
auugauuuaucuuggcccaauuc

SEQ ID NO: 6307 - RNA, 23 nt, artificial
  siRNA Oligomer
cagaacuaauuuccuauccucac

SEQ ID NO: 6308 - RNA, 23 nt, artificial
  siRNA Oligomer
agaacuaauuuccuauccucaca

SEQ ID NO: 6309 - RNA, 23 nt, artificial
  siRNA Oligomer
agguauccaagguggaaaaaauc

SEQ ID NO: 6310 - RNA, 23 nt, artificial
  siRNA Oligomer
aauguaaaacucaaaugggcuuc

SEQ ID NO: 6311 - RNA, 23 nt, artificial
  siRNA Oligomer
auguaaaacucaaaugggcuucu

SEQ ID NO: 6312 - RNA, 23 nt, artificial
  siRNA Oligomer
uguaaaacucaaaugggcuucua

SEQ ID NO: 6313 - RNA, 23 nt, artificial
  siRNA Oligomer
guaaaacucaaaugggcuucuac

SEQ ID NO: 6314 - RNA, 23 nt, artificial
  siRNA Oligomer
uaaaacucaaaugggcuucuacu

SEQ ID NO: 6315 - RNA, 23 nt, artificial
  siRNA Oligomer
aguccaugagcaguucuccugcu

SEQ ID NO: 6316 - RNA, 23 nt, artificial
  siRNA Oligomer
guccaugagcaguucuccugcuu

SEQ ID NO: 6317 - RNA, 23 nt, artificial
  siRNA Oligomer
uccaugagcaguucuccugcuua

SEQ ID NO: 6318 - RNA, 23 nt, artificial
  siRNA Oligomer
guggaaaaaaucugggugcaugc

SEQ ID NO: 6319 - RNA, 23 nt, artificial
  siRNA Oligomer
uggaaaaaaucugggugcaugca

SEQ ID NO: 6320 - RNA, 23 nt, artificial
  siRNA Oligomer
ggaaaaaaucugggugcaugcau

SEQ ID NO: 6321 - RNA, 23 nt, artificial
  siRNA Oligomer
gaaaaaaucugggugcaugcaug

SEQ ID NO: 6322 - RNA, 23 nt, artificial
  siRNA Oligomer
aaaaaaucugggugcaugcaugg

SEQ ID NO: 6323 - RNA, 23 nt, artificial
  siRNA Oligomer
aguagucaaaaucacuuagcagg

SEQ ID NO: 6324 - RNA, 23 nt, artificial
  siRNA Oligomer
ucaggaacaacauaaucccagua

SEQ ID NO: 6325 - RNA, 23 nt, artificial
  siRNA Oligomer
uuuguaagcauaacaggcaagag

SEQ ID NO: 6326 - RNA, 23 nt, artificial
  siRNA Oligomer
cuagugacagguauccaaggugg

SEQ ID NO: 6327 - RNA, 23 nt, artificial
  siRNA Oligomer
uagugacagguauccaaggugga

SEQ ID NO: 6328 - RNA, 23 nt, artificial
  siRNA Oligomer
agugacagguauccaagguggaa

SEQ ID NO: 6329 - RNA, 23 nt, artificial
  siRNA Oligomer
gugacagguauccaagguggaaa

SEQ ID NO: 6330 - RNA, 23 nt, artificial
  siRNA Oligomer
ugacagguauccaagguggaaaa

SEQ ID NO: 6331 - RNA, 23 nt, artificial
  siRNA Oligomer
aucacuucuccaaaggccagaaa

SEQ ID NO: 6332 - RNA, 23 nt, artificial
  siRNA Oligomer
acaaaaaugggaucuaugcagaa

SEQ ID NO: 6333 - RNA, 23 nt, artificial
  siRNA Oligomer
caaaaaugggaucuaugcagaaa

SEQ ID NO: 6334 - RNA, 23 nt, artificial
  siRNA Oligomer
aaaaaugggaucuaugcagaaaa

SEQ ID NO: 6335 - RNA, 23 nt, artificial
  siRNA Oligomer
auuaccucguugagguuggguuc

SEQ ID NO: 6336 - RNA, 23 nt, artificial
  siRNA Oligomer
agcaauucucugggucaguuucu

SEQ ID NO: 6337 - RNA, 23 nt, artificial
  siRNA Oligomer
uagagugaggaagucaccaagaa

SEQ ID NO: 6338 - RNA, 23 nt, artificial
  siRNA Oligomer
aaggccuuuauuauucccuagug

SEQ ID NO: 6339 - RNA, 23 nt, artificial
  siRNA Oligomer
caccauuuuguaagcauaacagg

SEQ ID NO: 6340 - RNA, 23 nt, artificial
  siRNA Oligomer
aaacucaaaugggcuucuacuuu

SEQ ID NO: 6341 - RNA, 23 nt, artificial
  siRNA Oligomer
aacucaaaugggcuucuacuuuu

SEQ ID NO: 6342 - RNA, 23 nt, artificial
  siRNA Oligomer
acucaaaugggcuucuacuuuug

SEQ ID NO: 6343 - RNA, 23 nt, artificial
  siRNA Oligomer
cucaaaugggcuucuacuuuugc

SEQ ID NO: 6344 - RNA, 23 nt, artificial
  siRNA Oligomer
ucaaaugggcuucuacuuuugcu

SEQ ID NO: 6345 - RNA, 23 nt, artificial
  siRNA Oligomer
acauaaucccaguagucaaaauc

SEQ ID NO: 6346 - RNA, 23 nt, artificial
  siRNA Oligomer
cauaaucccaguagucaaaauca

SEQ ID NO: 6347 - RNA, 23 nt, artificial
  siRNA Oligomer
auaaucccaguagucaaaaucac

SEQ ID NO: 6348 - RNA, 23 nt, artificial
  siRNA Oligomer
uaaucccaguagucaaaaucacu

SEQ ID NO: 6349 - RNA, 23 nt, artificial
  siRNA Oligomer
aaucccaguagucaaaaucacuu

SEQ ID NO: 6350 - RNA, 23 nt, artificial
  siRNA Oligomer
uaacagccuuccauaagccauca

SEQ ID NO: 6351 - RNA, 23 nt, artificial
  siRNA Oligomer
cuguuaguggaaaaaggacaaca

SEQ ID NO: 6352 - RNA, 23 nt, artificial
  siRNA Oligomer
uguuaguggaaaaaggacaacag

SEQ ID NO: 6353 - RNA, 23 nt, artificial
  siRNA Oligomer
guuaguggaaaaaggacaacagu

SEQ ID NO: 6354 - RNA, 23 nt, artificial
  siRNA Oligomer
uuaguggaaaaaggacaacaguu

SEQ ID NO: 6355 - RNA, 23 nt, artificial
  siRNA Oligomer
uaguggaaaaaggacaacaguuc

SEQ ID NO: 6356 - RNA, 23 nt, artificial
  siRNA Oligomer
auacaucugucccuacgccgguc

SEQ ID NO: 6357 - RNA, 23 nt, artificial
  siRNA Oligomer
gaucuaugcagaaaaucuacacu

SEQ ID NO: 6358 - RNA, 23 nt, artificial
  siRNA Oligomer
aucuaugcagaaaaucuacacua

SEQ ID NO: 6359 - RNA, 23 nt, artificial
  siRNA Oligomer
ucuaugcagaaaaucuacacuau

SEQ ID NO: 6360 - RNA, 23 nt, artificial
  siRNA Oligomer
cuaugcagaaaaucuacacuauu

SEQ ID NO: 6361 - RNA, 23 nt, artificial
  siRNA Oligomer
uaugcagaaaaucuacacuauuu

SEQ ID NO: 6362 - RNA, 23 nt, artificial
  siRNA Oligomer
cccuagugacagguauccaaggu

SEQ ID NO: 6363 - RNA, 23 nt, artificial
  siRNA Oligomer
ccuagugacagguauccaaggug

SEQ ID NO: 6364 - RNA, 23 nt, artificial
  siRNA Oligomer
ccaagguggaaaaaaucugggug

SEQ ID NO: 6365 - RNA, 23 nt, artificial
  siRNA Oligomer
caagguggaaaaaaucugggugc

SEQ ID NO: 6366 - RNA, 23 nt, artificial
  siRNA Oligomer
gaucucagaacuaauuuccuauc

SEQ ID NO: 6367 - RNA, 23 nt, artificial
  siRNA Oligomer
aucucagaacuaauuuccuaucc

SEQ ID NO: 6368 - RNA, 23 nt, artificial
  siRNA Oligomer
ucucagaacuaauuuccuauccu

SEQ ID NO: 6369 - RNA, 23 nt, artificial
  siRNA Oligomer
cucagaacuaauuuccuauccuc

SEQ ID NO: 6370 - RNA, 23 nt, artificial
  siRNA Oligomer
ucagaacuaauuuccuauccuca

SEQ ID NO: 6371 - RNA, 23 nt, artificial
  siRNA Oligomer
gggguuucuuauuuagggcaggu

SEQ ID NO: 6372 - RNA, 23 nt, artificial
  siRNA Oligomer
caaacuacaaaugacuuuagcug

SEQ ID NO: 6373 - RNA, 23 nt, artificial
  siRNA Oligomer
aaacuacaaaugacuuuagcuga

SEQ ID NO: 6374 - RNA, 23 nt, artificial
  siRNA Oligomer
aacuacaaaugacuuuagcugac

SEQ ID NO: 6375 - RNA, 23 nt, artificial
  siRNA Oligomer
acuacaaaugacuuuagcugacu

SEQ ID NO: 6376 - RNA, 23 nt, artificial
  siRNA Oligomer
cuacaaaugacuuuagcugacua

SEQ ID NO: 6377 - RNA, 23 nt, artificial
  siRNA Oligomer
gaaaacuuagagaaaaaaaagcc

SEQ ID NO: 6378 - RNA, 23 nt, artificial
  siRNA Oligomer
aaaacuuagagaaaaaaaagcca

SEQ ID NO: 6379 - RNA, 23 nt, artificial
  siRNA Oligomer
aaacuuagagaaaaaaaagccau

SEQ ID NO: 6380 - RNA, 23 nt, artificial
  siRNA Oligomer
aacuuagagaaaaaaaagccaua

SEQ ID NO: 6381 - RNA, 23 nt, artificial
  siRNA Oligomer
acuuagagaaaaaaaagccauau

SEQ ID NO: 6382 - RNA, 23 nt, artificial
  siRNA Oligomer
caauuuccaaguucacgugcaua

SEQ ID NO: 6383 - RNA, 23 nt, artificial
  siRNA Oligomer
aauuuccaaguucacgugcauaa

SEQ ID NO: 6384 - RNA, 23 nt, artificial
  siRNA Oligomer
auuuccaaguucacgugcauaac

SEQ ID NO: 6385 - RNA, 23 nt, artificial
  siRNA Oligomer
uuuccaaguucacgugcauaaca

SEQ ID NO: 6386 - RNA, 23 nt, artificial
  siRNA Oligomer
uuccaaguucacgugcauaacac

SEQ ID NO: 6387 - RNA, 23 nt, artificial
  siRNA Oligomer
aaaagucccugaagcuaguccau

SEQ ID NO: 6388 - RNA, 23 nt, artificial
  siRNA Oligomer
gccaguugcaaccauggucaacg

SEQ ID NO: 6389 - RNA, 23 nt, artificial
  siRNA Oligomer
ccaguugcaaccauggucaacgg

SEQ ID NO: 6390 - RNA, 23 nt, artificial
  siRNA Oligomer
caguugcaaccauggucaacggc

SEQ ID NO: 6391 - RNA, 23 nt, artificial
  siRNA Oligomer
aguugcaaccauggucaacggcu

SEQ ID NO: 6392 - RNA, 23 nt, artificial
  siRNA Oligomer
guugcaaccauggucaacggcuc

SEQ ID NO: 6393 - RNA, 23 nt, artificial
  siRNA Oligomer
uggagcuuaacaauagacaugca

SEQ ID NO: 6394 - RNA, 23 nt, artificial
  siRNA Oligomer
gccaaugcagacuucguaaauug

SEQ ID NO: 6395 - RNA, 23 nt, artificial
  siRNA Oligomer
ccaaugcagacuucguaaauuga

SEQ ID NO: 6396 - RNA, 23 nt, artificial
  siRNA Oligomer
caaugcagacuucguaaauugac

SEQ ID NO: 6397 - RNA, 23 nt, artificial
  siRNA Oligomer
aaugcagacuucguaaauugacc

SEQ ID NO: 6398 - RNA, 23 nt, artificial
  siRNA Oligomer
augcagacuucguaaauugaccc

SEQ ID NO: 6399 - RNA, 23 nt, artificial
  siRNA Oligomer
uacaaaugacuuuagcugacuag

SEQ ID NO: 6400 - RNA, 23 nt, artificial
  siRNA Oligomer
cacacacaauccuauccagcuuu

SEQ ID NO: 6401 - RNA, 23 nt, artificial
  siRNA Oligomer
acacacaauccuauccagcuuuu

SEQ ID NO: 6402 - RNA, 23 nt, artificial
  siRNA Oligomer
gaguuucauucucuaggcuguac

SEQ ID NO: 6403 - RNA, 23 nt, artificial
  siRNA Oligomer
aaaguagguacgacgcuagaauc

SEQ ID NO: 6404 - RNA, 23 nt, artificial
  siRNA Oligomer
aaguagguacgacgcuagaauca

SEQ ID NO: 6405 - RNA, 23 nt, artificial
  siRNA Oligomer
aguagguacgacgcuagaaucac

SEQ ID NO: 6406 - RNA, 23 nt, artificial
  siRNA Oligomer
guagguacgacgcuagaaucaca

SEQ ID NO: 6407 - RNA, 23 nt, artificial
  siRNA Oligomer
gugaaucagagagggacuagauc

SEQ ID NO: 6408 - RNA, 23 nt, artificial
  siRNA Oligomer
auuugaagaguuuaguuuguuag

SEQ ID NO: 6409 - RNA, 23 nt, artificial
  siRNA Oligomer
uuugaagaguuuaguuuguuaga

SEQ ID NO: 6410 - RNA, 23 nt, artificial
  siRNA Oligomer
uugaagaguuuaguuuguuagaa

SEQ ID NO: 6411 - RNA, 23 nt, artificial
  siRNA Oligomer
uaaaaacccuucaaauuugaguc

SEQ ID NO: 6412 - RNA, 23 nt, artificial
  siRNA Oligomer
aaaaacccuucaaauuugaguca

SEQ ID NO: 6413 - RNA, 23 nt, artificial
  siRNA Oligomer
aaaacccuucaaauuugagucag

SEQ ID NO: 6414 - RNA, 23 nt, artificial
  siRNA Oligomer
aaacccuucaaauuugagucagg

SEQ ID NO: 6415 - RNA, 23 nt, artificial
  siRNA Oligomer
aacccuucaaauuugagucagga

SEQ ID NO: 6416 - RNA, 23 nt, artificial
  siRNA Oligomer
ugaauugaacauuguugagugga

SEQ ID NO: 6417 - RNA, 23 nt, artificial
  siRNA Oligomer
gaauugaacauuguugaguggag

SEQ ID NO: 6418 - RNA, 23 nt, artificial
  siRNA Oligomer
aauugaacauuguugaguggagg

SEQ ID NO: 6419 - RNA, 23 nt, artificial
  siRNA Oligomer
auugaacauuguugaguggaggc

SEQ ID NO: 6420 - RNA, 23 nt, artificial
  siRNA Oligomer
uugaacauuguugaguggaggcu

SEQ ID NO: 6421 - RNA, 23 nt, artificial
  siRNA Oligomer
gggaucuaugcagaaaaucuaca

SEQ ID NO: 6422 - RNA, 23 nt, artificial
  siRNA Oligomer
ggaucuaugcagaaaaucuacac

SEQ ID NO: 6423 - RNA, 23 nt, artificial
  siRNA Oligomer
acuauaaaccauaucuccauagc

SEQ ID NO: 6424 - RNA, 23 nt, artificial
  siRNA Oligomer
cuauaaaccauaucuccauagcc

SEQ ID NO: 6425 - RNA, 23 nt, artificial
  siRNA Oligomer
uauaaaccauaucuccauagcca

SEQ ID NO: 6426 - RNA, 23 nt, artificial
  siRNA Oligomer
auaaaccauaucuccauagccaa

SEQ ID NO: 6427 - RNA, 23 nt, artificial
  siRNA Oligomer
uaaaccauaucuccauagccaau

SEQ ID NO: 6428 - RNA, 23 nt, artificial
  siRNA Oligomer
aauaauucaaagugguaguauac

SEQ ID NO: 6429 - RNA, 23 nt, artificial
  siRNA Oligomer
auaauucaaagugguaguauaca

SEQ ID NO: 6430 - RNA, 23 nt, artificial
  siRNA Oligomer
uaauucaaagugguaguauacag

SEQ ID NO: 6431 - RNA, 23 nt, artificial
  siRNA Oligomer
aauucaaagugguaguauacagc

SEQ ID NO: 6432 - RNA, 23 nt, artificial
  siRNA Oligomer
auucaaagugguaguauacagcu

SEQ ID NO: 6433 - RNA, 23 nt, artificial
  siRNA Oligomer
uugcaaccauggucaacggcucu

SEQ ID NO: 6434 - RNA, 23 nt, artificial
  siRNA Oligomer
aaauugacccguuucaauaauuc

SEQ ID NO: 6435 - RNA, 23 nt, artificial
  siRNA Oligomer
aauugacccguuucaauaauuca

SEQ ID NO: 6436 - RNA, 23 nt, artificial
  siRNA Oligomer
auugacccguuucaauaauucaa

SEQ ID NO: 6437 - RNA, 23 nt, artificial
  siRNA Oligomer
uugacccguuucaauaauucaaa

SEQ ID NO: 6438 - RNA, 23 nt, artificial
  siRNA Oligomer
ugacccguuucaauaauucaaag

SEQ ID NO: 6439 - RNA, 23 nt, artificial
  siRNA Oligomer
caaauguaaaacucaaaugggcu

SEQ ID NO: 6440 - RNA, 23 nt, artificial
  siRNA Oligomer
aaauguaaaacucaaaugggcuu

SEQ ID NO: 6441 - RNA, 23 nt, artificial
  siRNA Oligomer
acgcuagaaucacacacaauccu

SEQ ID NO: 6442 - RNA, 23 nt, artificial
  siRNA Oligomer
cgcuagaaucacacacaauccua

SEQ ID NO: 6443 - RNA, 23 nt, artificial
  siRNA Oligomer
gcuagaaucacacacaauccuau

SEQ ID NO: 6444 - RNA, 23 nt, artificial
  siRNA Oligomer
cuagaaucacacacaauccuauc

SEQ ID NO: 6445 - RNA, 23 nt, artificial
  siRNA Oligomer
uguaguaucuuuccaagcauuug

SEQ ID NO: 6446 - RNA, 23 nt, artificial
  siRNA Oligomer
aaaccauaucuccauagccaaug

SEQ ID NO: 6447 - RNA, 23 nt, artificial
  siRNA Oligomer
aagauaacuguuaguggaaaaag

SEQ ID NO: 6448 - RNA, 23 nt, artificial
  siRNA Oligomer
agauaacuguuaguggaaaaagg

SEQ ID NO: 6449 - RNA, 23 nt, artificial
  siRNA Oligomer
gauaacuguuaguggaaaaagga

SEQ ID NO: 6450 - RNA, 23 nt, artificial
  siRNA Oligomer
auaacuguuaguggaaaaaggac

SEQ ID NO: 6451 - RNA, 23 nt, artificial
  siRNA Oligomer
uaacuguuaguggaaaaaggaca

SEQ ID NO: 6452 - RNA, 23 nt, artificial
  siRNA Oligomer
aagguggaaaaaaucugggugca

SEQ ID NO: 6453 - RNA, 23 nt, artificial
  siRNA Oligomer
auauauuuucccuuuuuaggacc

SEQ ID NO: 6454 - RNA, 23 nt, artificial
  siRNA Oligomer
acuaaagaaaaagucccugaagc

SEQ ID NO: 6455 - RNA, 23 nt, artificial
  siRNA Oligomer
cuaaagaaaaagucccugaagcu

SEQ ID NO: 6456 - RNA, 23 nt, artificial
  siRNA Oligomer
uaaagaaaaagucccugaagcua

SEQ ID NO: 6457 - RNA, 23 nt, artificial
  siRNA Oligomer
uuguugccucuuuaaaacauuag

SEQ ID NO: 6458 - RNA, 23 nt, artificial
  siRNA Oligomer
aaaaauaaggccuuuauuauucc

SEQ ID NO: 6459 - RNA, 23 nt, artificial
  siRNA Oligomer
ggagcuuaacaauagacaugcaa

SEQ ID NO: 6460 - RNA, 23 nt, artificial
  siRNA Oligomer
gagcuuaacaauagacaugcaaa

SEQ ID NO: 6461 - RNA, 23 nt, artificial
  siRNA Oligomer
agcuuaacaauagacaugcaaaa

SEQ ID NO: 6462 - RNA, 23 nt, artificial
  siRNA Oligomer
uucaaagugguaguauacagcua

SEQ ID NO: 6463 - RNA, 23 nt, artificial
  siRNA Oligomer
ucaaagugguaguauacagcuac

SEQ ID NO: 6464 - RNA, 23 nt, artificial
  siRNA Oligomer
ugggaucuaugcagaaaaucuac

SEQ ID NO: 6465 - RNA, 23 nt, artificial
  siRNA Oligomer
uccaaguucacgugcauaacaca

SEQ ID NO: 6466 - RNA, 23 nt, artificial
  siRNA Oligomer
gagcaauucucugggucaguuuc

SEQ ID NO: 6467 - RNA, 23 nt, artificial
  siRNA Oligomer
ugguuaucuggacggugaguuuc

SEQ ID NO: 6468 - RNA, 23 nt, artificial
  siRNA Oligomer
gguuaucuggacggugaguuuca

SEQ ID NO: 6469 - RNA, 23 nt, artificial
  siRNA Oligomer
guuaucuggacggugaguuucau

SEQ ID NO: 6470 - RNA, 23 nt, artificial
  siRNA Oligomer
uuaucuggacggugaguuucauu

SEQ ID NO: 6471 - RNA, 23 nt, artificial
  siRNA Oligomer
accauggucaacggcucuguuuc

SEQ ID NO: 6472 - RNA, 23 nt, artificial
  siRNA Oligomer
ccauggucaacggcucuguuucc

SEQ ID NO: 6473 - RNA, 23 nt, artificial
  siRNA Oligomer
cauggucaacggcucuguuuccu

SEQ ID NO: 6474 - RNA, 23 nt, artificial
  siRNA Oligomer
auggucaacggcucuguuuccuu

SEQ ID NO: 6475 - RNA, 23 nt, artificial
  siRNA Oligomer
uggucaacggcucuguuuccuuc

SEQ ID NO: 6476 - RNA, 23 nt, artificial
  siRNA Oligomer
ugaguuucauucucuaggcugua

SEQ ID NO: 6477 - RNA, 23 nt, artificial
  siRNA Oligomer
ugagcugaggaucagaguucucc

SEQ ID NO: 6478 - RNA, 23 nt, artificial
  siRNA Oligomer
gagcugaggaucagaguucuccu

SEQ ID NO: 6479 - RNA, 23 nt, artificial
  siRNA Oligomer
agcugaggaucagaguucuccug

SEQ ID NO: 6480 - RNA, 23 nt, artificial
  siRNA Oligomer
gcugaggaucagaguucuccuga

SEQ ID NO: 6481 - RNA, 23 nt, artificial
  siRNA Oligomer
cugaggaucagaguucuccugaa

SEQ ID NO: 6482 - RNA, 23 nt, artificial
  siRNA Oligomer
cuacuaaagaaaaagucccugaa

SEQ ID NO: 6483 - RNA, 23 nt, artificial
  siRNA Oligomer
uacuaaagaaaaagucccugaag

SEQ ID NO: 6484 - RNA, 23 nt, artificial
  siRNA Oligomer
acucaauggaagaguaaucaacu

SEQ ID NO: 6485 - RNA, 23 nt, artificial
  siRNA Oligomer
cucaauggaagaguaaucaacua

SEQ ID NO: 6486 - RNA, 23 nt, artificial
  siRNA Oligomer
ucaauggaagaguaaucaacuac

SEQ ID NO: 6487 - RNA, 23 nt, artificial
  siRNA Oligomer
caauggaagaguaaucaacuaca

SEQ ID NO: 6488 - RNA, 23 nt, artificial
  siRNA Oligomer
aauggaagaguaaucaacuacac

SEQ ID NO: 6489 - RNA, 23 nt, artificial
  siRNA Oligomer
gacccuucaaucacuguuguucc

SEQ ID NO: 6490 - RNA, 23 nt, artificial
  siRNA Oligomer
acccuucaaucacuguuguucca

SEQ ID NO: 6491 - RNA, 23 nt, artificial
  siRNA Oligomer
cccuucaaucacuguuguuccaa

SEQ ID NO: 6492 - RNA, 23 nt, artificial
  siRNA Oligomer
ccuucaaucacuguuguuccaau

SEQ ID NO: 6493 - RNA, 23 nt, artificial
  siRNA Oligomer
cuucaaucacuguuguuccaauc

SEQ ID NO: 6494 - RNA, 23 nt, artificial
  siRNA Oligomer
caauucuauaaagauuggcuuug

SEQ ID NO: 6495 - RNA, 23 nt, artificial
  siRNA Oligomer
aauucuauaaagauuggcuuugu

SEQ ID NO: 6496 - RNA, 23 nt, artificial
  siRNA Oligomer
auucuauaaagauuggcuuugua

SEQ ID NO: 6497 - RNA, 23 nt, artificial
  siRNA Oligomer
uucuauaaagauuggcuuuguag

SEQ ID NO: 6498 - RNA, 23 nt, artificial
  siRNA Oligomer
ucuauaaagauuggcuuuguagu

SEQ ID NO: 6499 - RNA, 23 nt, artificial
  siRNA Oligomer
agacuucguaaauugacccguuu

SEQ ID NO: 6500 - RNA, 23 nt, artificial
  siRNA Oligomer
caucgaugcccaagaagccuugc

SEQ ID NO: 6501 - RNA, 23 nt, artificial
  siRNA Oligomer
aucgaugcccaagaagccuugcc

SEQ ID NO: 6502 - RNA, 23 nt, artificial
  siRNA Oligomer
ucgaugcccaagaagccuugccc

SEQ ID NO: 6503 - RNA, 23 nt, artificial
  siRNA Oligomer
ucucugggucaguuucucaggga

SEQ ID NO: 6504 - RNA, 23 nt, artificial
  siRNA Oligomer
cucugggucaguuucucagggac

SEQ ID NO: 6505 - RNA, 23 nt, artificial
  siRNA Oligomer
ucugggucaguuucucagggaca

SEQ ID NO: 6506 - RNA, 23 nt, artificial
  siRNA Oligomer
ccauaucuccauagccaaugcag

SEQ ID NO: 6507 - RNA, 23 nt, artificial
  siRNA Oligomer
cauaucuccauagccaaugcaga

SEQ ID NO: 6508 - RNA, 23 nt, artificial
  siRNA Oligomer
auaucuccauagccaaugcagac

SEQ ID NO: 6509 - RNA, 23 nt, artificial
  siRNA Oligomer
uaucuccauagccaaugcagacu

SEQ ID NO: 6510 - RNA, 23 nt, artificial
  siRNA Oligomer
aucuccauagccaaugcagacuu

SEQ ID NO: 6511 - RNA, 23 nt, artificial
  siRNA Oligomer
cgacgcuagaaucacacacaauc

SEQ ID NO: 6512 - RNA, 23 nt, artificial
  siRNA Oligomer
gacgcuagaaucacacacaaucc

SEQ ID NO: 6513 - RNA, 23 nt, artificial
  siRNA Oligomer
acaaaugacuuuagcugacuagc

SEQ ID NO: 6514 - RNA, 23 nt, artificial
  siRNA Oligomer
caaaugacuuuagcugacuagcu

SEQ ID NO: 6515 - RNA, 23 nt, artificial
  siRNA Oligomer
aaaugacuuuagcugacuagcug

SEQ ID NO: 6516 - RNA, 23 nt, artificial
  siRNA Oligomer
aaugacuuuagcugacuagcuga

SEQ ID NO: 6517 - RNA, 23 nt, artificial
  siRNA Oligomer
augacuuuagcugacuagcugaa

SEQ ID NO: 6518 - RNA, 23 nt, artificial
  siRNA Oligomer
ucaguaacaccaggaugaauaca

SEQ ID NO: 6519 - RNA, 23 nt, artificial
  siRNA Oligomer
caguaacaccaggaugaauacau

SEQ ID NO: 6520 - RNA, 23 nt, artificial
  siRNA Oligomer
aguaacaccaggaugaauacauc

SEQ ID NO: 6521 - RNA, 23 nt, artificial
  siRNA Oligomer
cuagcugaauaguuuuacuaccc

SEQ ID NO: 6522 - RNA, 23 nt, artificial
  siRNA Oligomer
uagcugaauaguuuuacuaccca

SEQ ID NO: 6523 - RNA, 23 nt, artificial
  siRNA Oligomer
agcugaauaguuuuacuacccaa

SEQ ID NO: 6524 - RNA, 23 nt, artificial
  siRNA Oligomer
gcugaauaguuuuacuacccaau

SEQ ID NO: 6525 - RNA, 23 nt, artificial
  siRNA Oligomer
uucaaucacuguuguuccaauca

SEQ ID NO: 6526 - RNA, 23 nt, artificial
  siRNA Oligomer
ucaaucacuguuguuccaaucag

SEQ ID NO: 6527 - RNA, 23 nt, artificial
  siRNA Oligomer
caaucacuguuguuccaaucagu

SEQ ID NO: 6528 - RNA, 23 nt, artificial
  siRNA Oligomer
aaucacuguuguuccaaucagug

SEQ ID NO: 6529 - RNA, 23 nt, artificial
  siRNA Oligomer
ggcaagagagucaaagauaacug

SEQ ID NO: 6530 - RNA, 23 nt, artificial
  siRNA Oligomer
gcaagagagucaaagauaacugu

SEQ ID NO: 6531 - RNA, 23 nt, artificial
  siRNA Oligomer
caagagagucaaagauaacuguu

SEQ ID NO: 6532 - RNA, 23 nt, artificial
  siRNA Oligomer
aagagagucaaagauaacuguua

SEQ ID NO: 6533 - RNA, 23 nt, artificial
  siRNA Oligomer
agagagucaaagauaacuguuag

SEQ ID NO: 6534 - RNA, 23 nt, artificial
  siRNA Oligomer
agccuaccugaaaccaaauugug

SEQ ID NO: 6535 - RNA, 23 nt, artificial
  siRNA Oligomer
gccuaccugaaaccaaauugugg

SEQ ID NO: 6536 - RNA, 23 nt, artificial
  siRNA Oligomer
ccuaccugaaaccaaauugugga

SEQ ID NO: 6537 - RNA, 23 nt, artificial
  siRNA Oligomer
cuaccugaaaccaaauuguggaa

SEQ ID NO: 6538 - RNA, 23 nt, artificial
  siRNA Oligomer
uaccugaaaccaaauuguggaau

SEQ ID NO: 6539 - RNA, 23 nt, artificial
  siRNA Oligomer
uacacuauuuugaaucacuucuc

SEQ ID NO: 6540 - RNA, 23 nt, artificial
  siRNA Oligomer
gauacuucaauucccagaaaagc

SEQ ID NO: 6541 - RNA, 23 nt, artificial
  siRNA Oligomer
ucuccauagccaaugcagacuuc

SEQ ID NO: 6542 - RNA, 23 nt, artificial
  siRNA Oligomer
cuauaaagauuggcuuuguagua

SEQ ID NO: 6543 - RNA, 23 nt, artificial
  siRNA Oligomer
uauaaagauuggcuuuguaguau

SEQ ID NO: 6544 - RNA, 23 nt, artificial
  siRNA Oligomer
auaaagauuggcuuuguaguauc

SEQ ID NO: 6545 - RNA, 23 nt, artificial
  siRNA Oligomer
uaaagauuggcuuuguaguaucu

SEQ ID NO: 6546 - RNA, 23 nt, artificial
  siRNA Oligomer
augcagaaaaucuacacuauuuu

SEQ ID NO: 6547 - RNA, 23 nt, artificial
  siRNA Oligomer
caaaugggcuucuacuuuugcuu

SEQ ID NO: 6548 - RNA, 23 nt, artificial
  siRNA Oligomer
aaaugggcuucuacuuuugcuua

SEQ ID NO: 6549 - RNA, 23 nt, artificial
  siRNA Oligomer
aaugggcuucuacuuuugcuuac

SEQ ID NO: 6550 - RNA, 23 nt, artificial
  siRNA Oligomer
ugcagacuucguaaauugacccg

SEQ ID NO: 6551 - RNA, 23 nt, artificial
  siRNA Oligomer
gcagacuucguaaauugacccgu

SEQ ID NO: 6552 - RNA, 23 nt, artificial
  siRNA Oligomer
cagacuucguaaauugacccguu

SEQ ID NO: 6553 - RNA, 23 nt, artificial
  siRNA Oligomer
aucacuguuguuccaaucaguga

SEQ ID NO: 6554 - RNA, 23 nt, artificial
  siRNA Oligomer
ggauaugaaagccuugcugaauu

SEQ ID NO: 6555 - RNA, 23 nt, artificial
  siRNA Oligomer
gauaugaaagccuugcugaauug

SEQ ID NO: 6556 - RNA, 23 nt, artificial
  siRNA Oligomer
auaugaaagccuugcugaauuga

SEQ ID NO: 6557 - RNA, 23 nt, artificial
  siRNA Oligomer
uaugaaagccuugcugaauugaa

SEQ ID NO: 6558 - RNA, 23 nt, artificial
  siRNA Oligomer
augaaagccuugcugaauugaac

SEQ ID NO: 6559 - RNA, 23 nt, artificial
  siRNA Oligomer
uuccuauccucacagguauucau

SEQ ID NO: 6560 - RNA, 23 nt, artificial
  siRNA Oligomer
uuuacuacccaaucaugaaauaa

SEQ ID NO: 6561 - RNA, 23 nt, artificial
  siRNA Oligomer
caaaaucacuuagcaggcucucu

SEQ ID NO: 6562 - RNA, 23 nt, artificial
  siRNA Oligomer
cauuuacucuuaccuaggguuaa

SEQ ID NO: 6563 - RNA, 23 nt, artificial
  siRNA Oligomer
auuuacucuuaccuaggguuaag

SEQ ID NO: 6564 - RNA, 23 nt, artificial
  siRNA Oligomer
uuuacucuuaccuaggguuaagc

SEQ ID NO: 6565 - RNA, 23 nt, artificial
  siRNA Oligomer
uuacucuuaccuaggguuaagcu

SEQ ID NO: 6566 - RNA, 23 nt, artificial
  siRNA Oligomer
aguggaaaaaggacaacaguucu

SEQ ID NO: 6567 - RNA, 23 nt, artificial
  siRNA Oligomer
guggaaaaaggacaacaguucua

SEQ ID NO: 6568 - RNA, 23 nt, artificial
  siRNA Oligomer
uggaaaaaggacaacaguucuac

SEQ ID NO: 6569 - RNA, 23 nt, artificial
  siRNA Oligomer
acaguccagcaauucugaaaugc

SEQ ID NO: 6570 - RNA, 23 nt, artificial
  siRNA Oligomer
caguccagcaauucugaaaugcu

SEQ ID NO: 6571 - RNA, 23 nt, artificial
  siRNA Oligomer
aguccagcaauucugaaaugcug

SEQ ID NO: 6572 - RNA, 23 nt, artificial
  siRNA Oligomer
guccagcaauucugaaaugcugg

SEQ ID NO: 6573 - RNA, 23 nt, artificial
  siRNA Oligomer
uccagcaauucugaaaugcuggc

SEQ ID NO: 6574 - RNA, 23 nt, artificial
  siRNA Oligomer
aguguaagcucaaaaguagguac

SEQ ID NO: 6575 - RNA, 23 nt, artificial
  siRNA Oligomer
guguaagcucaaaaguagguacg

SEQ ID NO: 6576 - RNA, 23 nt, artificial
  siRNA Oligomer
uguaagcucaaaaguagguacga

SEQ ID NO: 6577 - RNA, 23 nt, artificial
  siRNA Oligomer
guaagcucaaaaguagguacgac

SEQ ID NO: 6578 - RNA, 23 nt, artificial
  siRNA Oligomer
gaucuacuuaguuggaauaagac

SEQ ID NO: 6579 - RNA, 23 nt, artificial
  siRNA Oligomer
aucuacuuaguuggaauaagaca

SEQ ID NO: 6580 - RNA, 23 nt, artificial
  siRNA Oligomer
ucuacuuaguuggaauaagacaa

SEQ ID NO: 6581 - RNA, 23 nt, artificial
  siRNA Oligomer
cuacuuaguuggaauaagacaaa

SEQ ID NO: 6582 - RNA, 23 nt, artificial
  siRNA Oligomer
uacuuaguuggaauaagacaaaa

SEQ ID NO: 6583 - RNA, 23 nt, artificial
  siRNA Oligomer
gcaguucuccugcuuaaacacaa

SEQ ID NO: 6584 - RNA, 23 nt, artificial
  siRNA Oligomer
caguucuccugcuuaaacacaag

SEQ ID NO: 6585 - RNA, 23 nt, artificial
  siRNA Oligomer
aguucuccugcuuaaacacaagu

SEQ ID NO: 6586 - RNA, 23 nt, artificial
  siRNA Oligomer
guucuccugcuuaaacacaagug

SEQ ID NO: 6587 - RNA, 23 nt, artificial
  siRNA Oligomer
uucuccugcuuaaacacaagugu

SEQ ID NO: 6588 - RNA, 23 nt, artificial
  siRNA Oligomer
uuuuaaccaaauucuggcaaguu

SEQ ID NO: 6589 - RNA, 23 nt, artificial
  siRNA Oligomer
uguugccucuuuaaaacauuaga

SEQ ID NO: 6590 - RNA, 23 nt, artificial
  siRNA Oligomer
guugccucuuuaaaacauuagag

SEQ ID NO: 6591 - RNA, 23 nt, artificial
  siRNA Oligomer
uugccucuuuaaaacauuagagu

SEQ ID NO: 6592 - RNA, 23 nt, artificial
  siRNA Oligomer
ugccucuuuaaaacauuagagug

SEQ ID NO: 6593 - RNA, 23 nt, artificial
  siRNA Oligomer
uaaaaaauccucugaaaacuuag

SEQ ID NO: 6594 - RNA, 23 nt, artificial
  siRNA Oligomer
aaaaaauccucugaaaacuuaga

SEQ ID NO: 6595 - RNA, 23 nt, artificial
  siRNA Oligomer
aaaaauccucugaaaacuuagag

SEQ ID NO: 6596 - RNA, 23 nt, artificial
  siRNA Oligomer
aaaauccucugaaaacuuagaga

SEQ ID NO: 6597 - RNA, 23 nt, artificial
  siRNA Oligomer
aaauccucugaaaacuuagagaa

SEQ ID NO: 6598 - RNA, 23 nt, artificial
  siRNA Oligomer
ucucuaggcuguacuauaaacca

SEQ ID NO: 6599 - RNA, 23 nt, artificial
  siRNA Oligomer
cucuaggcuguacuauaaaccau

SEQ ID NO: 6600 - RNA, 23 nt, artificial
  siRNA Oligomer
ucuaggcuguacuauaaaccaua

SEQ ID NO: 6601 - RNA, 23 nt, artificial
  siRNA Oligomer
cuaggcuguacuauaaaccauau

SEQ ID NO: 6602 - RNA, 23 nt, artificial
  siRNA Oligomer
agaguucuccugaaaccagagga

SEQ ID NO: 6603 - RNA, 23 nt, artificial
  siRNA Oligomer
gaguucuccugaaaccagaggag

SEQ ID NO: 6604 - RNA, 23 nt, artificial
  siRNA Oligomer
aguucuccugaaaccagaggaga

SEQ ID NO: 6605 - RNA, 23 nt, artificial
  siRNA Oligomer
guucuccugaaaccagaggagaa

SEQ ID NO: 6606 - RNA, 23 nt, artificial
  siRNA Oligomer
uucuccugaaaccagaggagaag

SEQ ID NO: 6607 - RNA, 23 nt, artificial
  siRNA Oligomer
uuauaaaggcaucuaaaacaaca

SEQ ID NO: 6608 - RNA, 23 nt, artificial
  siRNA Oligomer
uauaaaggcaucuaaaacaacac

SEQ ID NO: 6609 - RNA, 23 nt, artificial
  siRNA Oligomer
auaaaggcaucuaaaacaacacc

SEQ ID NO: 6610 - RNA, 23 nt, artificial
  siRNA Oligomer
aaaggcaucuaaaacaacaccgu

SEQ ID NO: 6611 - RNA, 23 nt, artificial
  siRNA Oligomer
aucccaguagucaaaaucacuua

SEQ ID NO: 6612 - RNA, 23 nt, artificial
  siRNA Oligomer
acagccuuccauaagccaucacc

SEQ ID NO: 6613 - RNA, 23 nt, artificial
  siRNA Oligomer
cagccuuccauaagccaucacca

SEQ ID NO: 6614 - RNA, 23 nt, artificial
  siRNA Oligomer
agccuuccauaagccaucaccau

SEQ ID NO: 6615 - RNA, 23 nt, artificial
  siRNA Oligomer
auacagcuacuacccuugacaau

SEQ ID NO: 6616 - RNA, 23 nt, artificial
  siRNA Oligomer
uacagcuacuacccuugacaauu

SEQ ID NO: 6617 - RNA, 23 nt, artificial
  siRNA Oligomer
acagcuacuacccuugacaauug

SEQ ID NO: 6618 - RNA, 23 nt, artificial
  siRNA Oligomer
cuccugaaaccagaggagaagcg

SEQ ID NO: 6619 - RNA, 23 nt, artificial
  siRNA Oligomer
uccugaaaccagaggagaagcga

SEQ ID NO: 6620 - RNA, 23 nt, artificial
  siRNA Oligomer
ccugaaaccagaggagaagcgac

SEQ ID NO: 6621 - RNA, 23 nt, artificial
  siRNA Oligomer
cugaaaccagaggagaagcgacc

SEQ ID NO: 6622 - RNA, 23 nt, artificial
  siRNA Oligomer
ugaaaccagaggagaagcgaccu

SEQ ID NO: 6623 - RNA, 23 nt, artificial
  siRNA Oligomer
uagacaugcaaaacaacauugau

SEQ ID NO: 6624 - RNA, 23 nt, artificial
  siRNA Oligomer
caaaaguagguacgacgcuagaa

SEQ ID NO: 6625 - RNA, 23 nt, artificial
  siRNA Oligomer
aaaaguagguacgacgcuagaau

SEQ ID NO: 6626 - RNA, 23 nt, artificial
  siRNA Oligomer
ugggugcaugcaugguuaucugg

SEQ ID NO: 6627 - RNA, 23 nt, artificial
  siRNA Oligomer
gggugcaugcaugguuaucugga

SEQ ID NO: 6628 - RNA, 23 nt, artificial
  siRNA Oligomer
ggugcaugcaugguuaucuggac

SEQ ID NO: 6629 - RNA, 23 nt, artificial
  siRNA Oligomer
gugcaugcaugguuaucuggacg

SEQ ID NO: 6630 - RNA, 23 nt, artificial
  siRNA Oligomer
cugguggugugggcuuuuggaag

SEQ ID NO: 6631 - RNA, 23 nt, artificial
  siRNA Oligomer
ugguggugugggcuuuuggaagu

SEQ ID NO: 6632 - RNA, 23 nt, artificial
  siRNA Oligomer
gguggugugggcuuuuggaaguu

SEQ ID NO: 6633 - RNA, 23 nt, artificial
  siRNA Oligomer
guggugugggcuuuuggaaguuu

SEQ ID NO: 6634 - RNA, 23 nt, artificial
  siRNA Oligomer
uggugugggcuuuuggaaguuuu

SEQ ID NO: 6635 - RNA, 23 nt, artificial
  siRNA Oligomer
aggcaagagagucaaagauaacu

SEQ ID NO: 6636 - RNA, 23 nt, artificial
  siRNA Oligomer
aaagacaguauucaacacuuaag

SEQ ID NO: 6637 - RNA, 23 nt, artificial
  siRNA Oligomer
aagacaguauucaacacuuaaga

SEQ ID NO: 6638 - RNA, 23 nt, artificial
  siRNA Oligomer
agacaguauucaacacuuaagaa

SEQ ID NO: 6639 - RNA, 23 nt, artificial
  siRNA Oligomer
gacaguauucaacacuuaagaac

SEQ ID NO: 6640 - RNA, 23 nt, artificial
  siRNA Oligomer
acaguauucaacacuuaagaaca

SEQ ID NO: 6641 - RNA, 23 nt, artificial
  siRNA Oligomer
gccuguuagcugcaguugcuaug

SEQ ID NO: 6642 - RNA, 23 nt, artificial
  siRNA Oligomer
ccuguuagcugcaguugcuauga

SEQ ID NO: 6643 - RNA, 23 nt, artificial
  siRNA Oligomer
cuguuagcugcaguugcuaugaa

SEQ ID NO: 6644 - RNA, 23 nt, artificial
  siRNA Oligomer
uguuagcugcaguugcuaugaau

SEQ ID NO: 6645 - RNA, 23 nt, artificial
  siRNA Oligomer
guuagcugcaguugcuaugaaug

SEQ ID NO: 6646 - RNA, 23 nt, artificial
  siRNA Oligomer
auucugaaaugcuggccggguuc

SEQ ID NO: 6647 - RNA, 23 nt, artificial
  siRNA Oligomer
aacaacauugauuuaucuuggcc

SEQ ID NO: 6648 - RNA, 23 nt, artificial
  siRNA Oligomer
caguuccauuauugccguaauau

SEQ ID NO: 6649 - RNA, 23 nt, artificial
  siRNA Oligomer
aguuccauuauugccguaauauu

SEQ ID NO: 6650 - RNA, 23 nt, artificial
  siRNA Oligomer
guuccauuauugccguaauauuu

SEQ ID NO: 6651 - RNA, 23 nt, artificial
  siRNA Oligomer
uuccauuauugccguaauauuuc

SEQ ID NO: 6652 - RNA, 23 nt, artificial
  siRNA Oligomer
uccauuauugccguaauauuucu

SEQ ID NO: 6653 - RNA, 23 nt, artificial
  siRNA Oligomer
acacaauccuauccagcuuuuua

SEQ ID NO: 6654 - RNA, 23 nt, artificial
  siRNA Oligomer
gagguuggguucaggaacaacau

SEQ ID NO: 6655 - RNA, 23 nt, artificial
  siRNA Oligomer
agguuggguucaggaacaacaua

SEQ ID NO: 6656 - RNA, 23 nt, artificial
  siRNA Oligomer
gguuggguucaggaacaacauaa

SEQ ID NO: 6657 - RNA, 23 nt, artificial
  siRNA Oligomer
guuggguucaggaacaacauaau

SEQ ID NO: 6658 - RNA, 23 nt, artificial
  siRNA Oligomer
uuggguucaggaacaacauaauc

SEQ ID NO: 6659 - RNA, 23 nt, artificial
  siRNA Oligomer
aggaucagaguucuccugaaacc

SEQ ID NO: 6660 - RNA, 23 nt, artificial
  siRNA Oligomer
ggaucagaguucuccugaaacca

SEQ ID NO: 6661 - RNA, 23 nt, artificial
  siRNA Oligomer
gaucagaguucuccugaaaccag

SEQ ID NO: 6662 - RNA, 23 nt, artificial
  siRNA Oligomer
aucagaguucuccugaaaccaga

SEQ ID NO: 6663 - RNA, 23 nt, artificial
  siRNA Oligomer
ucagaguucuccugaaaccagag

SEQ ID NO: 6664 - RNA, 23 nt, artificial
  siRNA Oligomer
caaacugccaguugcaaccaugg

SEQ ID NO: 6665 - RNA, 23 nt, artificial
  siRNA Oligomer
aaacugccaguugcaaccauggu

SEQ ID NO: 6666 - RNA, 23 nt, artificial
  siRNA Oligomer
aacugccaguugcaaccaugguc

SEQ ID NO: 6667 - RNA, 23 nt, artificial
  siRNA Oligomer
acugccaguugcaaccaugguca

SEQ ID NO: 6668 - RNA, 23 nt, artificial
  siRNA Oligomer
auaguaucaguaacaggaucaca

SEQ ID NO: 6669 - RNA, 23 nt, artificial
  siRNA Oligomer
uuacuacccaaucaugaaauaau

SEQ ID NO: 6670 - RNA, 23 nt, artificial
  siRNA Oligomer
auccuaccuuccugucuaaaaac

SEQ ID NO: 6671 - RNA, 23 nt, artificial
  siRNA Oligomer
uccuaccuuccugucuaaaaacc

SEQ ID NO: 6672 - RNA, 23 nt, artificial
  siRNA Oligomer
ccuaccuuccugucuaaaaaccc

SEQ ID NO: 6673 - RNA, 23 nt, artificial
  siRNA Oligomer
cuaccuuccugucuaaaaacccu

SEQ ID NO: 6674 - RNA, 23 nt, artificial
  siRNA Oligomer
cuaauagcuagggcaggaaaccu

SEQ ID NO: 6675 - RNA, 23 nt, artificial
  siRNA Oligomer
uaauagcuagggcaggaaaccug

SEQ ID NO: 6676 - RNA, 23 nt, artificial
  siRNA Oligomer
aauagcuagggcaggaaaccuga

SEQ ID NO: 6677 - RNA, 23 nt, artificial
  siRNA Oligomer
auagcuagggcaggaaaccugaa

SEQ ID NO: 6678 - RNA, 23 nt, artificial
  siRNA Oligomer
uagcuagggcaggaaaccugaau

SEQ ID NO: 6679 - RNA, 23 nt, artificial
  siRNA Oligomer
ccuugcugaauugaacauuguug

SEQ ID NO: 6680 - RNA, 23 nt, artificial
  siRNA Oligomer
cuugcugaauugaacauuguuga

SEQ ID NO: 6681 - RNA, 23 nt, artificial
  siRNA Oligomer
uugcugaauugaacauuguugag

SEQ ID NO: 6682 - RNA, 23 nt, artificial
  siRNA Oligomer
ugcugaauugaacauuguugagu

SEQ ID NO: 6683 - RNA, 23 nt, artificial
  siRNA Oligomer
gcugaauugaacauuguugagug

SEQ ID NO: 6684 - RNA, 23 nt, artificial
  siRNA Oligomer
gcacauguaauacugaaaagagg

SEQ ID NO: 6685 - RNA, 23 nt, artificial
  siRNA Oligomer
cacauguaauacugaaaagagga

SEQ ID NO: 6686 - RNA, 23 nt, artificial
  siRNA Oligomer
acauguaauacugaaaagaggau

SEQ ID NO: 6687 - RNA, 23 nt, artificial
  siRNA Oligomer
cauguaauacugaaaagaggaua

SEQ ID NO: 6688 - RNA, 23 nt, artificial
  siRNA Oligomer
auguaauacugaaaagaggauag

SEQ ID NO: 6689 - RNA, 23 nt, artificial
  siRNA Oligomer
guuuaaagacaguauucaacacu

SEQ ID NO: 6690 - RNA, 23 nt, artificial
  siRNA Oligomer
uuuaaagacaguauucaacacuu

SEQ ID NO: 6691 - RNA, 23 nt, artificial
  siRNA Oligomer
uuaaagacaguauucaacacuua

SEQ ID NO: 6692 - RNA, 23 nt, artificial
  siRNA Oligomer
uaaagacaguauucaacacuuaa

SEQ ID NO: 6693 - RNA, 23 nt, artificial
  siRNA Oligomer
ggacccuucaaucacuguuguuc

SEQ ID NO: 6694 - RNA, 23 nt, artificial
  siRNA Oligomer
uguaauacugaaaagaggauaga

SEQ ID NO: 6695 - RNA, 23 nt, artificial
  siRNA Oligomer
acuagaucucagaacuaauuucc

SEQ ID NO: 6696 - RNA, 23 nt, artificial
  siRNA Oligomer
cuagaucucagaacuaauuuccu

SEQ ID NO: 6697 - RNA, 23 nt, artificial
  siRNA Oligomer
uagaucucagaacuaauuuccua

SEQ ID NO: 6698 - RNA, 23 nt, artificial
  siRNA Oligomer
agaucucagaacuaauuuccuau

SEQ ID NO: 6699 - RNA, 23 nt, artificial
  siRNA Oligomer
aacuguuaguggaaaaaggacaa

SEQ ID NO: 6700 - RNA, 23 nt, artificial
  siRNA Oligomer
ucacuucuccaaaggccagaaaa

SEQ ID NO: 6701 - RNA, 23 nt, artificial
  siRNA Oligomer
cacuucuccaaaggccagaaaau

SEQ ID NO: 6702 - RNA, 23 nt, artificial
  siRNA Oligomer
acuucuccaaaggccagaaaauc

SEQ ID NO: 6703 - RNA, 23 nt, artificial
  siRNA Oligomer
acuaagugaaucagagagggacu

SEQ ID NO: 6704 - RNA, 23 nt, artificial
  siRNA Oligomer
cuaagugaaucagagagggacua

SEQ ID NO: 6705 - RNA, 23 nt, artificial
  siRNA Oligomer
uaagugaaucagagagggacuag

SEQ ID NO: 6706 - RNA, 23 nt, artificial
  siRNA Oligomer
aagugaaucagagagggacuaga

SEQ ID NO: 6707 - RNA, 23 nt, artificial
  siRNA Oligomer
aucuuggcccaauucuauaaaga

SEQ ID NO: 6708 - RNA, 23 nt, artificial
  siRNA Oligomer
gaggaucagaguucuccugaaac

SEQ ID NO: 6709 - RNA, 23 nt, artificial
  siRNA Oligomer
gugaaguggagcuaauagcuagg

SEQ ID NO: 6710 - RNA, 23 nt, artificial
  siRNA Oligomer
cuaaaaacccuucaaauuugagu

SEQ ID NO: 6711 - RNA, 23 nt, artificial
  siRNA Oligomer
aggccagaaaaucagccuguuag

SEQ ID NO: 6712 - RNA, 23 nt, artificial
  siRNA Oligomer
ggccagaaaaucagccuguuagc

SEQ ID NO: 6713 - RNA, 23 nt, artificial
  siRNA Oligomer
gccagaaaaucagccuguuagcu

SEQ ID NO: 6714 - RNA, 23 nt, artificial
  siRNA Oligomer
ccagaaaaucagccuguuagcug

SEQ ID NO: 6715 - RNA, 23 nt, artificial
  siRNA Oligomer
cagaaaaucagccuguuagcugc

SEQ ID NO: 6716 - RNA, 23 nt, artificial
  siRNA Oligomer
aagccuugcugaauugaacauug

SEQ ID NO: 6717 - RNA, 23 nt, artificial
  siRNA Oligomer
agccuugcugaauugaacauugu

SEQ ID NO: 6718 - RNA, 23 nt, artificial
  siRNA Oligomer
gccuugcugaauugaacauuguu

SEQ ID NO: 6719 - RNA, 23 nt, artificial
  siRNA Oligomer
acaccuguuuuucaguaacacca

SEQ ID NO: 6720 - RNA, 23 nt, artificial
  siRNA Oligomer
caccuguuuuucaguaacaccag

SEQ ID NO: 6721 - RNA, 23 nt, artificial
  siRNA Oligomer
accuguuuuucaguaacaccagg

SEQ ID NO: 6722 - RNA, 23 nt, artificial
  siRNA Oligomer
ucguugagguuggguucaggaac

SEQ ID NO: 6723 - RNA, 23 nt, artificial
  siRNA Oligomer
cguugagguuggguucaggaaca

SEQ ID NO: 6724 - RNA, 23 nt, artificial
  siRNA Oligomer
guugagguuggguucaggaacaa

SEQ ID NO: 6725 - RNA, 23 nt, artificial
  siRNA Oligomer
uugagguuggguucaggaacaac

SEQ ID NO: 6726 - RNA, 23 nt, artificial
  siRNA Oligomer
ugagguuggguucaggaacaaca

SEQ ID NO: 6727 - RNA, 23 nt, artificial
  siRNA Oligomer
ugaggaucagaguucuccugaaa

SEQ ID NO: 6728 - RNA, 23 nt, artificial
  siRNA Oligomer
uuuaaccaaauucuggcaaguug

SEQ ID NO: 6729 - RNA, 23 nt, artificial
  siRNA Oligomer
agaaaaucagccuguuagcugca

SEQ ID NO: 6730 - RNA, 23 nt, artificial
  siRNA Oligomer
gaaaaucagccuguuagcugcag

SEQ ID NO: 6731 - RNA, 23 nt, artificial
  siRNA Oligomer
aaaaucagccuguuagcugcagu

SEQ ID NO: 6732 - RNA, 23 nt, artificial
  siRNA Oligomer
aaagaaaagagacuacauuuggg

SEQ ID NO: 6733 - RNA, 23 nt, artificial
  siRNA Oligomer
aagaaaagagacuacauuugggg

SEQ ID NO: 6734 - RNA, 23 nt, artificial
  siRNA Oligomer
agaaaagagacuacauuuggggu

SEQ ID NO: 6735 - RNA, 23 nt, artificial
  siRNA Oligomer
gaaaagagacuacauuugggguu

SEQ ID NO: 6736 - RNA, 23 nt, artificial
  siRNA Oligomer
aaaagagacuacauuugggguuu

SEQ ID NO: 6737 - RNA, 23 nt, artificial
  siRNA Oligomer
aaaaaucugggugcaugcauggu

SEQ ID NO: 6738 - RNA, 23 nt, artificial
  siRNA Oligomer
ccaagaaacagugaagcaguucc

SEQ ID NO: 6739 - RNA, 23 nt, artificial
  siRNA Oligomer
caagaaacagugaagcaguucca

SEQ ID NO: 6740 - RNA, 23 nt, artificial
  siRNA Oligomer
aagaaacagugaagcaguuccau

SEQ ID NO: 6741 - RNA, 23 nt, artificial
  siRNA Oligomer
agaaacagugaagcaguuccauu

SEQ ID NO: 6742 - RNA, 23 nt, artificial
  siRNA Oligomer
gaaacagugaagcaguuccauua

SEQ ID NO: 6743 - RNA, 23 nt, artificial
  siRNA Oligomer
gcagaaacacagugaaccuuugg

SEQ ID NO: 6744 - RNA, 23 nt, artificial
  siRNA Oligomer
cagaaacacagugaaccuuugga

SEQ ID NO: 6745 - RNA, 23 nt, artificial
  siRNA Oligomer
agaaacacagugaaccuuuggag

SEQ ID NO: 6746 - RNA, 23 nt, artificial
  siRNA Oligomer
gaaacacagugaaccuuuggagc

SEQ ID NO: 6747 - RNA, 23 nt, artificial
  siRNA Oligomer
aaacacagugaaccuuuggagcu

SEQ ID NO: 6748 - RNA, 23 nt, artificial
  siRNA Oligomer
acacugccauggugaaaugguuc

SEQ ID NO: 6749 - RNA, 23 nt, artificial
  siRNA Oligomer
cacugccauggugaaaugguuca

SEQ ID NO: 6750 - RNA, 23 nt, artificial
  siRNA Oligomer
acugccauggugaaaugguucau

SEQ ID NO: 6751 - RNA, 23 nt, artificial
  siRNA Oligomer
cugccauggugaaaugguucauc

SEQ ID NO: 6752 - RNA, 23 nt, artificial
  siRNA Oligomer
accuuugagcaaccaaguuuagu

SEQ ID NO: 6753 - RNA, 23 nt, artificial
  siRNA Oligomer
ccuuugagcaaccaaguuuaguu

SEQ ID NO: 6754 - RNA, 23 nt, artificial
  siRNA Oligomer
cuuugagcaaccaaguuuaguuu

SEQ ID NO: 6755 - RNA, 23 nt, artificial
  siRNA Oligomer
uuugagcaaccaaguuuaguuug

SEQ ID NO: 6756 - RNA, 23 nt, artificial
  siRNA Oligomer
uugagcaaccaaguuuaguuugc

SEQ ID NO: 6757 - RNA, 23 nt, artificial
  siRNA Oligomer
aaaaugggaucuaugcagaaaau

SEQ ID NO: 6758 - RNA, 23 nt, artificial
  siRNA Oligomer
aaaugggaucuaugcagaaaauc

SEQ ID NO: 6759 - RNA, 23 nt, artificial
  siRNA Oligomer
aaugggaucuaugcagaaaaucu

SEQ ID NO: 6760 - RNA, 23 nt, artificial
  siRNA Oligomer
augggaucuaugcagaaaaucua

SEQ ID NO: 6761 - RNA, 23 nt, artificial
  siRNA Oligomer
uagccaaugcagacuucguaaau

SEQ ID NO: 6762 - RNA, 23 nt, artificial
  siRNA Oligomer
aaaaaaggaaagagauaaugauc

SEQ ID NO: 6763 - RNA, 23 nt, artificial
  siRNA Oligomer
aaaaaggaaagagauaaugaucu

SEQ ID NO: 6764 - RNA, 23 nt, artificial
  siRNA Oligomer
aaaaggaaagagauaaugaucua

SEQ ID NO: 6765 - RNA, 23 nt, artificial
  siRNA Oligomer
aaaggaaagagauaaugaucuac

SEQ ID NO: 6766 - RNA, 23 nt, artificial
  siRNA Oligomer
aaggaaagagauaaugaucuacu

SEQ ID NO: 6767 - RNA, 23 nt, artificial
  siRNA Oligomer
aaccauaucuccauagccaaugc

SEQ ID NO: 6768 - RNA, 23 nt, artificial
  siRNA Oligomer
agugguaguauacagcuacuacc

SEQ ID NO: 6769 - RNA, 23 nt, artificial
  siRNA Oligomer
cagcuacuacccuugacaauugg

SEQ ID NO: 6770 - RNA, 23 nt, artificial
  siRNA Oligomer
agcuacuacccuugacaauuggg

SEQ ID NO: 6771 - RNA, 23 nt, artificial
  siRNA Oligomer
gcuacuacccuugacaauugggg

SEQ ID NO: 6772 - RNA, 23 nt, artificial
  siRNA Oligomer
cuacuacccuugacaauuggggu

SEQ ID NO: 6773 - RNA, 23 nt, artificial
  siRNA Oligomer
uacuacccuugacaauugggguu

SEQ ID NO: 6774 - RNA, 23 nt, artificial
  siRNA Oligomer
ugaaaagaggauagauuacuaag

SEQ ID NO: 6775 - RNA, 23 nt, artificial
  siRNA Oligomer
gaaaagaggauagauuacuaagu

SEQ ID NO: 6776 - RNA, 23 nt, artificial
  siRNA Oligomer
aaaagaggauagauuacuaagug

SEQ ID NO: 6777 - RNA, 23 nt, artificial
  siRNA Oligomer
aaagaggauagauuacuaaguga

SEQ ID NO: 6778 - RNA, 23 nt, artificial
  siRNA Oligomer
aagaggauagauuacuaagugaa

SEQ ID NO: 6779 - RNA, 23 nt, artificial
  siRNA Oligomer
ccagucaguggugacaacuccag

SEQ ID NO: 6780 - RNA, 23 nt, artificial
  siRNA Oligomer
cagucaguggugacaacuccagg

SEQ ID NO: 6781 - RNA, 23 nt, artificial
  siRNA Oligomer
agucaguggugacaacuccagga

SEQ ID NO: 6782 - RNA, 23 nt, artificial
  siRNA Oligomer
gucaguggugacaacuccaggac

SEQ ID NO: 6783 - RNA, 23 nt, artificial
  siRNA Oligomer
ucaguggugacaacuccaggaca

SEQ ID NO: 6784 - RNA, 23 nt, artificial
  siRNA Oligomer
ccggguucuugcugcucaaacug

SEQ ID NO: 6785 - RNA, 23 nt, artificial
  siRNA Oligomer
caggaacaacauaaucccaguag

SEQ ID NO: 6786 - RNA, 23 nt, artificial
  siRNA Oligomer
aggaacaacauaaucccaguagu

SEQ ID NO: 6787 - RNA, 23 nt, artificial
  siRNA Oligomer
ggaacaacauaaucccaguaguc

SEQ ID NO: 6788 - RNA, 23 nt, artificial
  siRNA Oligomer
gaacaacauaaucccaguaguca

SEQ ID NO: 6789 - RNA, 23 nt, artificial
  siRNA Oligomer
aacaacauaaucccaguagucaa

SEQ ID NO: 6790 - RNA, 23 nt, artificial
  siRNA Oligomer
caggaugaauacaucugucccua

SEQ ID NO: 6791 - RNA, 23 nt, artificial
  siRNA Oligomer
aggaugaauacaucugucccuac

SEQ ID NO: 6792 - RNA, 23 nt, artificial
  siRNA Oligomer
ggaugaauacaucugucccuacg

SEQ ID NO: 6793 - RNA, 23 nt, artificial
  siRNA Oligomer
uuggcccaauucuauaaagauug

SEQ ID NO: 6794 - RNA, 23 nt, artificial
  siRNA Oligomer
uggcccaauucuauaaagauugg

SEQ ID NO: 6795 - RNA, 23 nt, artificial
  siRNA Oligomer
ggcccaauucuauaaagauuggc

SEQ ID NO: 6796 - RNA, 23 nt, artificial
  siRNA Oligomer
gcccaauucuauaaagauuggcu

SEQ ID NO: 6797 - RNA, 23 nt, artificial
  siRNA Oligomer
cccaauucuauaaagauuggcuu

SEQ ID NO: 6798 - RNA, 23 nt, artificial
  siRNA Oligomer
acuguuaguggaaaaaggacaac

SEQ ID NO: 6799 - RNA, 23 nt, artificial
  siRNA Oligomer
uauauauuuucccuuuuuaggac

SEQ ID NO: 6800 - RNA, 23 nt, artificial
  siRNA Oligomer
uuggaaguuuugauaggcuaaau

SEQ ID NO: 6801 - RNA, 23 nt, artificial
  siRNA Oligomer
uuccaagcauuugaagaguuuag

SEQ ID NO: 6802 - RNA, 23 nt, artificial
  siRNA Oligomer
uccaagcauuugaagaguuuagu

SEQ ID NO: 6803 - RNA, 23 nt, artificial
  siRNA Oligomer
ccaagcauuugaagaguuuaguu

SEQ ID NO: 6804 - RNA, 23 nt, artificial
  siRNA Oligomer
caagcauuugaagaguuuaguuu

SEQ ID NO: 6805 - RNA, 23 nt, artificial
  siRNA Oligomer
aagcauuugaagaguuuaguuug

SEQ ID NO: 6806 - RNA, 23 nt, artificial
  siRNA Oligomer
cacgugcauaacacaaccucgca

SEQ ID NO: 6807 - RNA, 23 nt, artificial
  siRNA Oligomer
acgugcauaacacaaccucgcaa

SEQ ID NO: 6808 - RNA, 23 nt, artificial
  siRNA Oligomer
uuaaccaaauucuggcaaguuga

SEQ ID NO: 6809 - RNA, 23 nt, artificial
  siRNA Oligomer
ugaaauggcaccacaagcuuuug

SEQ ID NO: 6810 - RNA, 23 nt, artificial
  siRNA Oligomer
gaaauggcaccacaagcuuuugu

SEQ ID NO: 6811 - RNA, 23 nt, artificial
  siRNA Oligomer
aaauggcaccacaagcuuuuguu

SEQ ID NO: 6812 - RNA, 23 nt, artificial
  siRNA Oligomer
aauggcaccacaagcuuuuguug

SEQ ID NO: 6813 - RNA, 23 nt, artificial
  siRNA Oligomer
cagcaaggauaugaaagccuugc

SEQ ID NO: 6814 - RNA, 23 nt, artificial
  siRNA Oligomer
agcaaggauaugaaagccuugcu

SEQ ID NO: 6815 - RNA, 23 nt, artificial
  siRNA Oligomer
gcaaggauaugaaagccuugcug

SEQ ID NO: 6816 - RNA, 23 nt, artificial
  siRNA Oligomer
caaggauaugaaagccuugcuga

SEQ ID NO: 6817 - RNA, 23 nt, artificial
  siRNA Oligomer
aaggauaugaaagccuugcugaa

SEQ ID NO: 6818 - RNA, 23 nt, artificial
  siRNA Oligomer
aaagauuggcuuuguaguaucuu

SEQ ID NO: 6819 - RNA, 23 nt, artificial
  siRNA Oligomer
aacaagucgaaauccugagcuga

SEQ ID NO: 6820 - RNA, 23 nt, artificial
  siRNA Oligomer
gcccagagaugagauaacacugc

SEQ ID NO: 6821 - RNA, 23 nt, artificial
  siRNA Oligomer
cccagagaugagauaacacugcc

SEQ ID NO: 6822 - RNA, 23 nt, artificial
  siRNA Oligomer
ccagagaugagauaacacugcca

SEQ ID NO: 6823 - RNA, 23 nt, artificial
  siRNA Oligomer
cagagaugagauaacacugccau

SEQ ID NO: 6824 - RNA, 23 nt, artificial
  siRNA Oligomer
agagaugagauaacacugccaug

SEQ ID NO: 6825 - RNA, 23 nt, artificial
  siRNA Oligomer
ucuuggcccaauucuauaaagau

SEQ ID NO: 6826 - RNA, 23 nt, artificial
  siRNA Oligomer
cuuggcccaauucuauaaagauu

SEQ ID NO: 6827 - RNA, 23 nt, artificial
  siRNA Oligomer
auucaauucuguacaaaaauggg

SEQ ID NO: 6828 - RNA, 23 nt, artificial
  siRNA Oligomer
uucaauucuguacaaaaauggga

SEQ ID NO: 6829 - RNA, 23 nt, artificial
  siRNA Oligomer
ucaauucuguacaaaaaugggau

SEQ ID NO: 6830 - RNA, 23 nt, artificial
  siRNA Oligomer
caauucuguacaaaaaugggauc

SEQ ID NO: 6831 - RNA, 23 nt, artificial
  siRNA Oligomer
aauucuguacaaaaaugggaucu

SEQ ID NO: 6832 - RNA, 23 nt, artificial
  siRNA Oligomer
uggaagaguaaucaacuacacac

SEQ ID NO: 6833 - RNA, 23 nt, artificial
  siRNA Oligomer
ggaagaguaaucaacuacacaca

SEQ ID NO: 6834 - RNA, 23 nt, artificial
  siRNA Oligomer
gaagaguaaucaacuacacacaa

SEQ ID NO: 6835 - RNA, 23 nt, artificial
  siRNA Oligomer
aagaguaaucaacuacacacaaa

SEQ ID NO: 6836 - RNA, 23 nt, artificial
  siRNA Oligomer
agaguaaucaacuacacacaaaa

SEQ ID NO: 6837 - RNA, 23 nt, artificial
  siRNA Oligomer
uugccguaauauuucucauuuac

SEQ ID NO: 6838 - RNA, 23 nt, artificial
  siRNA Oligomer
agguggaaaaaaucugggugcau

SEQ ID NO: 6839 - RNA, 23 nt, artificial
  siRNA Oligomer
gguggaaaaaaucugggugcaug

SEQ ID NO: 6840 - RNA, 23 nt, artificial
  siRNA Oligomer
auucuguacaaaaaugggaucua

SEQ ID NO: 6841 - RNA, 23 nt, artificial
  siRNA Oligomer
uucuguacaaaaaugggaucuau

SEQ ID NO: 6842 - RNA, 23 nt, artificial
  siRNA Oligomer
auagccacaguccagcaauucug

SEQ ID NO: 6843 - RNA, 23 nt, artificial
  siRNA Oligomer
uagccacaguccagcaauucuga

SEQ ID NO: 6844 - RNA, 23 nt, artificial
  siRNA Oligomer
agccacaguccagcaauucugaa

SEQ ID NO: 6845 - RNA, 23 nt, artificial
  siRNA Oligomer
gccacaguccagcaauucugaaa

SEQ ID NO: 6846 - RNA, 23 nt, artificial
  siRNA Oligomer
ccacaguccagcaauucugaaau

SEQ ID NO: 6847 - RNA, 23 nt, artificial
  siRNA Oligomer
acaacauaaucccaguagucaaa

SEQ ID NO: 6848 - RNA, 23 nt, artificial
  siRNA Oligomer
caacauaaucccaguagucaaaa

SEQ ID NO: 6849 - RNA, 23 nt, artificial
  siRNA Oligomer
aacauaaucccaguagucaaaau

SEQ ID NO: 6850 - RNA, 23 nt, artificial
  siRNA Oligomer
gcaggacaucuugagcaauucuc

SEQ ID NO: 6851 - RNA, 23 nt, artificial
  siRNA Oligomer
caggacaucuugagcaauucucu

SEQ ID NO: 6852 - RNA, 23 nt, artificial
  siRNA Oligomer
aggacaucuugagcaauucucug

SEQ ID NO: 6853 - RNA, 23 nt, artificial
  siRNA Oligomer
ggaaaaaggacaacaguucuaca

SEQ ID NO: 6854 - RNA, 23 nt, artificial
  siRNA Oligomer
gaaaaaggacaacaguucuacau

SEQ ID NO: 6855 - RNA, 23 nt, artificial
  siRNA Oligomer
aaaaaggacaacaguucuacauc

SEQ ID NO: 6856 - RNA, 23 nt, artificial
  siRNA Oligomer
aaaaggacaacaguucuacaucg

SEQ ID NO: 6857 - RNA, 23 nt, artificial
  siRNA Oligomer
cauucaauucuguacaaaaaugg

SEQ ID NO: 6858 - RNA, 23 nt, artificial
  siRNA Oligomer
gaaaugguucaucugagauuaag

SEQ ID NO: 6859 - RNA, 23 nt, artificial
  siRNA Oligomer
aaaugguucaucugagauuaagc

SEQ ID NO: 6860 - RNA, 23 nt, artificial
  siRNA Oligomer
aaugguucaucugagauuaagca

SEQ ID NO: 6861 - RNA, 23 nt, artificial
  siRNA Oligomer
ucuccagcauuuuaaccaaauuc

SEQ ID NO: 6862 - RNA, 23 nt, artificial
  siRNA Oligomer
cuccagcauuuuaaccaaauucu

SEQ ID NO: 6863 - RNA, 23 nt, artificial
  siRNA Oligomer
uccagcauuuuaaccaaauucug

SEQ ID NO: 6864 - RNA, 23 nt, artificial
  siRNA Oligomer
ccagcauuuuaaccaaauucugg

SEQ ID NO: 6865 - RNA, 23 nt, artificial
  siRNA Oligomer
aauccuaccuuccugucuaaaaa

SEQ ID NO: 6866 - RNA, 23 nt, artificial
  siRNA Oligomer
gggguuaaggagagauacuucaa

SEQ ID NO: 6867 - RNA, 23 nt, artificial
  siRNA Oligomer
ggguuaaggagagauacuucaau

SEQ ID NO: 6868 - RNA, 23 nt, artificial
  siRNA Oligomer
gguuaaggagagauacuucaauu

SEQ ID NO: 6869 - RNA, 23 nt, artificial
  siRNA Oligomer
guuaaggagagauacuucaauuc

SEQ ID NO: 6870 - RNA, 23 nt, artificial
  siRNA Oligomer
uuaaggagagauacuucaauucc

SEQ ID NO: 6871 - RNA, 23 nt, artificial
  siRNA Oligomer
cauaacaggcaagagagucaaag

SEQ ID NO: 6872 - RNA, 23 nt, artificial
  siRNA Oligomer
auaacaggcaagagagucaaaga

SEQ ID NO: 6873 - RNA, 23 nt, artificial
  siRNA Oligomer
uaacaggcaagagagucaaagau

SEQ ID NO: 6874 - RNA, 23 nt, artificial
  siRNA Oligomer
aacaggcaagagagucaaagaua

SEQ ID NO: 6875 - RNA, 23 nt, artificial
  siRNA Oligomer
acaggcaagagagucaaagauaa

SEQ ID NO: 6876 - RNA, 23 nt, artificial
  siRNA Oligomer
aggcucucugggugauagccaca

SEQ ID NO: 6877 - RNA, 23 nt, artificial
  siRNA Oligomer
ggcucucugggugauagccacag

SEQ ID NO: 6878 - RNA, 23 nt, artificial
  siRNA Oligomer
gcucucugggugauagccacagu

SEQ ID NO: 6879 - RNA, 23 nt, artificial
  siRNA Oligomer
cucucugggugauagccacaguc

SEQ ID NO: 6880 - RNA, 23 nt, artificial
  siRNA Oligomer
ucucugggugauagccacagucc

SEQ ID NO: 6881 - RNA, 23 nt, artificial
  siRNA Oligomer
aagacaaaaaauaaggccuuuau

SEQ ID NO: 6882 - RNA, 23 nt, artificial
  siRNA Oligomer
agcccagagaugagauaacacug

SEQ ID NO: 6883 - RNA, 23 nt, artificial
  siRNA Oligomer
ugcugcucaaacugccaguugca

SEQ ID NO: 6884 - RNA, 23 nt, artificial
  siRNA Oligomer
gcugcucaaacugccaguugcaa

SEQ ID NO: 6885 - RNA, 23 nt, artificial
  siRNA Oligomer
uacuacccaaucaugaaauaauc

SEQ ID NO: 6886 - RNA, 23 nt, artificial
  siRNA Oligomer
aaacugagcuuauaaaggcaucu

SEQ ID NO: 6887 - RNA, 23 nt, artificial
  siRNA Oligomer
aacugagcuuauaaaggcaucua

SEQ ID NO: 6888 - RNA, 23 nt, artificial
  siRNA Oligomer
acugagcuuauaaaggcaucuaa

SEQ ID NO: 6889 - RNA, 23 nt, artificial
  siRNA Oligomer
cugagcuuauaaaggcaucuaaa

SEQ ID NO: 6890 - RNA, 23 nt, artificial
  siRNA Oligomer
ugagcuuauaaaggcaucuaaaa

SEQ ID NO: 6891 - RNA, 23 nt, artificial
  siRNA Oligomer
acagugaaccuuuggagcuuaac

SEQ ID NO: 6892 - RNA, 23 nt, artificial
  siRNA Oligomer
cagugaaccuuuggagcuuaaca

SEQ ID NO: 6893 - RNA, 23 nt, artificial
  siRNA Oligomer
agugaaccuuuggagcuuaacaa

SEQ ID NO: 6894 - RNA, 23 nt, artificial
  siRNA Oligomer
gugaaccuuuggagcuuaacaau

SEQ ID NO: 6895 - RNA, 23 nt, Artificial
  siRNA Oligomer
ugaaccuuuggagcuuaacaaua

SEQ ID NO: 6896 - RNA, 19 nt, artificial
  siRNA Oligomer
cccagagaauugcucaaga

SEQ ID NO: 6897 - RNA, 19 nt, artificial
  siRNA Oligomer
cgugaacuuggaaauugaa

SEQ ID NO: 6898 - RNA, 19 nt, artificial
  siRNA Oligomer
acgugaacuuggaaauuga

SEQ ID NO: 6899 - RNA, 19 nt, artificial
  siRNA Oligomer
uggagaacugucuguccaa

SEQ ID NO: 6900 - RNA, 19 nt, artificial
  siRNA Oligomer
guaaaaagcuggauaggau

SEQ ID NO: 6901 - RNA, 19 nt, artificial
  siRNA Oligomer
ugaacuuggaaauugaaaa

SEQ ID NO: 6902 - RNA, 19 nt, artificial
  siRNA Oligomer
guauguaaaaagcuggaua

SEQ ID NO: 6903 - RNA, 19 nt, artificial
  siRNA Oligomer
gauuucgacuuguuaagaa

SEQ ID NO: 6904 - RNA, 19 nt, artificial
  siRNA Oligomer
gaacuuggaaauugaaaau

SEQ ID NO: 6905 - RNA, 19 nt, artificial
  siRNA Oligomer
ggauuucgacuuguuaaga

SEQ ID NO: 6906 - RNA, 19 nt, artificial
  siRNA Oligomer
gcacgugaacuuggaaauu

SEQ ID NO: 6907 - RNA, 19 nt, artificial
  siRNA Oligomer
ccugagaaacugacccaga

SEQ ID NO: 6908 - RNA, 19 nt, artificial
  siRNA Oligomer
gaacugucuguccaaauca

SEQ ID NO: 6909 - RNA, 19 nt, artificial
  siRNA Oligomer
cucaggauuucgacuuguu

SEQ ID NO: 6910 - RNA, 19 nt, artificial
  siRNA Oligomer
gcucaggauuucgacuugu

SEQ ID NO: 6911 - RNA, 19 nt, artificial
  siRNA Oligomer
gacuuguuaagaaaaaacu

SEQ ID NO: 6912 - RNA, 19 nt, artificial
  siRNA Oligomer
ucuugagcaauucucuggg

SEQ ID NO: 6913 - RNA, 19 nt, artificial
  siRNA Oligomer
uucaauuuccaaguucacg

SEQ ID NO: 6914 - RNA, 19 nt, artificial
  siRNA Oligomer
ucaauuuccaaguucacgu

SEQ ID NO: 6915 - RNA, 19 nt, artificial
  siRNA Oligomer
uuggacagacaguucucca

SEQ ID NO: 6916 - RNA, 19 nt, artificial
  siRNA Oligomer
auccuauccagcuuuuuac

SEQ ID NO: 6917 - RNA, 19 nt, artificial
  siRNA Oligomer
uuuucaauuuccaaguuca

SEQ ID NO: 6918 - RNA, 19 nt, artificial
  siRNA Oligomer
uauccagcuuuuuacauac

SEQ ID NO: 6919 - RNA, 19 nt, artificial
  siRNA Oligomer
uucuuaacaagucgaaauc

SEQ ID NO: 6920 - RNA, 19 nt, artificial
  siRNA Oligomer
auuuucaauuuccaaguuc

SEQ ID NO: 6921 - RNA, 19 nt, artificial
  siRNA Oligomer
ucuuaacaagucgaaaucc

SEQ ID NO: 6922 - RNA, 19 nt, artificial
  siRNA Oligomer
aauuuccaaguucacgugc

SEQ ID NO: 6923 - RNA, 19 nt, artificial
  siRNA Oligomer
ucugggucaguuucucagg

SEQ ID NO: 6924 - RNA, 19 nt, artificial
  siRNA Oligomer
ugauuuggacagacaguuc

SEQ ID NO: 6925 - RNA, 19 nt, artificial
  siRNA Oligomer
aacaagucgaaauccugag

SEQ ID NO: 6926 - RNA, 19 nt, artificial
  siRNA Oligomer
acaagucgaaauccugagc

SEQ ID NO: 6927 - RNA, 19 nt, artificial
  siRNA Oligomer
aguuuuuucuuaacaaguc

1. A compound having the following structure:

| | |
|---|---|
| 5′ (N)x-Z 3′ | (antisense strand) |
| 3′ Z′-(N′)y-z″ 5′ | (sense strand) |

wherein each of N and N′ is a ribonucleotide which may be unmodified or modified, or an unconventional moiety;
wherein each of (N)x and (N′)y is an oligonucleotide in which each consecutive N or N′ is joined to the next N or N′ by a covalent bond;
wherein Z and Z′ may be present or absent, but if present is independently 1-5 consecutive nucleotides covalently attached at the 3′ terminus of the strand in which it is present;
wherein z″ may be present or absent, but if present is a capping moiety covalently attached at the 5′ terminus of (N′)y;
wherein each of x and y is independently an integer between 18 and 40;
wherein (N)x comprises modified and unmodified ribonucleotides, each modified ribonucleotide having a 2′-O-methyl on its sugar, wherein N at the 3′ terminus of (N)x is a modified ribonucleotide, (N)x comprises at least five alternating modified ribonucleotides beginning at the 3′ end and at least nine modified ribonucleotides in total and each remaining N is an unmodified ribonucleotide;
wherein in (N′)y at least one unconventional moiety is present, which unconventional moiety may be a modified or unmodified deoxyribonucleotide, a mirror nucleotide, or a nucleotide joined to an adjacent nucleotide by a 2′-5′ internucleotide phosphate bond;
wherein the sequence of (N′)y is substantially complementary to the sequence of (N)x; and wherein the sequence of (N)ₓ comprises an oligonucleotide set forth in SEQ ID NO:6914, 6915, 999 or 1000.

2. A compound of claim 1, wherein x=y=19.

3. A compound of claim 2, wherein (N)x comprises a 2′ O-methyl sugar modified ribonucleotide in the first, third, fifth, seventh, ninth, eleventh, thirteenth, fifteenth, seventeenth and nineteenth positions.

4. A compound of claim 2, wherein (N)x comprises a 2′ O-methyl sugar modified ribonucleotide in the second, fourth, sixth, eighth, eleventh, thirteenth, fifteenth, seventeenth and nineteenth positions.

5. A compound of claim 1, wherein in (N′)y the unconventional moiety is a mirror nucleotide.

6. A compound of claim 1, wherein (N′)y comprises a mirror nucleotide at position 18.

7. A compound of claim 6, wherein (N′)y further comprises a mirror nucleotide at position 17.

8. A compound of claim 1, wherein (N′)y comprises a deoxyribonucleotide at position 15.

9. A compound of claim 1, wherein (N)x and (N′)y are unphosphorylated or phosphorylated at the 5′ and 3′ termini.

10. A compound of claim 9, wherein (N)x is unphosphorylated at the 3′ termini.

11. A compound of claim 1, wherein z″ is present.

12. A compound of claim 1 having the structure [chemical structure]
wherein in (N)x the ribonucleotides alternate between modified ribonucleotides and unmodified ribonucleotides, each modified ribonucleotide being modified so as to have a 2′-O-methyl on its sugar and the ribonucleotide located at the middle position being unmodified;
wherein in (N′)y the nucleotide at position 18 or 17 and 18 is a mirror nucleotide and the nucleotide at position 15 is optionally an unmodified ribonucleotide or a deoxyribonucleotide;
and wherein the antisense and the sense strands are unphosphorylated at the 3′ termini.

13. A compound of claim 1 having the structure [chemical structure]
wherein in (N)x the ribonucleotides alternate between modified ribonucleotides and unmodified ribonucleotides, each modified ribonucleotide being modified so as to have a 2′-O-methyl on its sugar and the ribonucleotide located at the middle position being unmodified;
wherein in (N′)y the nucleotide at position 18 or 17 and 18 is a mirror nucleotide and the nucleotide at position 15 is optionally an unmodified ribonucleotide or a deoxyribonucleotide;
and wherein the antisense and the sense strands are unphosphorylated at the 3′ termini.

14. The compound of claim 12, wherein (N)x comprises the 2′ O-methyl sugar modified ribonucleotides in the first, third, fifth, seventh, ninth, eleventh, thirteenth, fifteenth, seventeenth and nineteenth ribonucleotide, or in the second, fourth, sixth, eighth, eleventh, thirteenth, fifteenth, seventeenth and nineteenth positions.

15. A pharmaceutical composition comprising the compound of claim 1 and a pharmaceutically acceptable carrier.

16. A method of treating a subject suffering from a respiratory disorder, an eye disease, a microvascular disorder, a hearing disorder or spinal cord injury or disease which comprises administering to the subject the compound of claim 1.

17. The method of claim 16, wherein the subject is in need of neuroprotection.

18-19. (canceled)

20. The method of claim 16, wherein the subject is suffering from an eye disease selected from the group consisting of an eye disease secondary to diabetes, wet or dry macular degeneration and glaucoma.

21. The method of claim 16, wherein the subject is suffering from a respiratory disorder selected from the group consisting of Acute Lung Injury, COPD and asthma.

22. The method of claim 16, wherein the subject is suffering from a microvascular disorder selected from the group consisting of ischemia, pressure sores and acute renal failure.

23. The method of claim 16, wherein the subject is suffering from a hearing disorder selected from the group consisting of age-related deafness, noise induced deafness and cisplatin-induced deafness.

24. A compound having the structure:

| | |
|---|---|
| 5′ (N)ₓ-Z 3′ | (antisense strand) |
| 3′ Z′-(N′)_{y}-z″ 5′ | (sense strand) |

wherein each of N and N′ is a ribonucleotide which may be unmodified or modified, or an unconventional moiety;
wherein each of (N)x and (N′)y is an oligonucleotide in which each consecutive N or N′ is joined to the next N or N′ by a covalent bond;
wherein Z and Z′ may be present or absent, but if present is independently 1-5 consecutive nucleotides covalently attached at the 3′ terminus of the strand in which it is present;
wherein z″ may be present or absent, but if present is a capping moiety covalently attached at the 5′ terminus of (N′)y;
each of x and y is independently an integer between 18 and 40;
wherein the sequence of (N)x is substantially complementary to the sequence of (N′)y; and the sequence of (N′)y is substantially identical to any one of the sense sequences set forth in any one of Tables B-F set forth in SEQ ID NOS:1852-6927.

25-28. (canceled)

29. The compound of claim 13, wherein (N)x comprises the 2′ O-methyl sugar modified ribonucleotides in the first, third, fifth, seventh, ninth, eleventh, thirteenth, fifteenth, seventeenth and nineteenth ribonucleotide, or in the second, fourth, sixth, eighth, eleventh, thirteenth, fifteenth, seventeenth and nineteenth positions.
